(19) United States
(12) Patent Application Publication
(10) Pub. No.: US 2025/0051779 A1
(43) Pub. Date: Feb. 13, 2025

(54) INHIBIN SUBUNIT BETA E (INHBE) MODULATOR COMPOSITIONS AND METHODS OF USE THEREOF

(71) Applicant: Alnylam Pharmaceuticals, Inc., Cambridge, MA (US)

(72) Inventor: Aimee M. Deaton, Somerville, MA (US)

(21) Appl. No.: 18/607,663

(22) Filed: Mar. 18, 2024

Related U.S. Application Data
(63) Continuation of application No. PCT/US2022/043948, filed on Sep. 19, 2022.
(60) Provisional application No. 63/246,084, filed on Sep. 20, 2021.

(51) Int. Cl. C12N 15/113

(52) U.S. Cl. CPC C12N 15/1136; C12N 2310/11; C12N 2310/321; C12N 2310/322; C12N 2310/3341; C12N 2310/341

(57) ABSTRACT

The present invention relates to modulators, e.g., double stranded RNA (dsRNA) agents, antisense polynucleotide agents, antibodies, guideRNAs that effect ADAR editing, or guideRNAs that effect CRISPR editing, that modulate, e.g., inhibit, the expression and/or activity of inhibin subunit beta E (INHBE). The invention also relates to methods of using such modulators to inhibit expression and/or activity of INHBE and to methods of preventing and treating an INHBE-associated disorder, e.g., metabolic disorder, e.g., metabolic syndrome, in a subject.

### RELATED APPLICATIONS

[0001] This application is a 35 § U.S.C. 111(a) continuation application which claims the benefit of priority to International Application No. PCT/US2022/043948, filed on Sep. 19, 2022, which, in turn, claims the benefit of priority to U.S. Provisional Application No. 63/246,084, filed on Sep. 20, 2021. The entire contents of each of the foregoing applications are incorporated herein by reference.

[0002] This application is related to U.S. Provisional Application No. 63/223,995, filed on Jul. 21, 2021, U.S. Provisional Application No. 63/278,126, filed on Nov. 11, 2021, U.S. Provisional Application No. 63/285,143, filed on Dec. 2, 2021, U.S. Provisional Application No. 63/287,578, filed on Dec. 9, 2021, U.S. Provisional Application No. 63/321,799, filed on Mar. 21, 2022, U.S. Provisional Application No. 63/323,543, filed on Mar. 25, 2022, and PCT Application No. PCT/US2022/037658, filed on Jul. 20, 2022. The entire contents of each of the foregoing applications are incorporated herein by reference.

### SEQUENCE LISTING

[0003] The instant application contains a Sequence Listing which has been submitted electronically in XML file format via Patent Center and is hereby incorporated by reference in its entirety. Said XML copy, created on Apr. 19, 2024, is named 121301_17002_SL.xml and is 5,341,801 bytes in size.

### BACKGROUND OF THE INVENTION

[0004] With the successful conquest of many infectious diseases in most of the world, non-communicable diseases, metabolic disorders in particular, have become a major health hazard of the modern world. The increase in consumption of high calorie-low fiber fast food and the decrease in physical activity due to mechanized transportations and sedentary lifestyle have resulted in the spread of metabolic disorders such as metabolic syndrome, type 2 diabetes, hypertension, cardiovascular diseases, stroke, and other disabilities. Indeed, the occurences of subjects with a metabolic disorder, such as, metabolic syndrome, who have a number of health conditions placing them at higher risk for heart disease, diabetes, stroke, and other diseases have increased in the recent years.

[0005] Current treatments for disorders of lipid metabolism include lifestyle changes, dieting, exercise and treatment with agents, such as lipid lowering agents, e.g., statins, and other drugs. However, these therapies and treatments are often limited by compliance, are not always effective, result in side effects, and result in drug-drug interactions. Accordingly, there is a need in the art for alternative treatments for subjects having metabolic disorders.

[0006] Inhibin subunit beta E (INHBE) is a member of the transforming growth factor-β (TGF-β) family. Predominantly expressed in the liver, INHBE is a hepatokine which has been shown to positively correlate with insulin resistance and body mass index in humans. Quantitative real time-PCR analysis also showed an increase in INHBE gene expression in liver samples from insulin-resistant human subjects. In addition, Inhbe gene expression was shown to be increased in the livers of an art-recognized animal model of a metabolic disorder, i.e., type 2 diabetes, the db/db mouse model. Inhibition of Inhbe expression in db/db mice was demonstrated to suppress body weight gain which was attributable to diminished fat rather than lean mass.

[0007] As indicated above, there is an unmet need for effective treatments for metablic disorders, such as metablic syndrome and related diseases, e.g., diabetes, hypertension, and cardiovascular disease, such as an agent that can selectively and efficiently modulate, i.e., inhibit INHBE expression and/or activity.

### SUMMARY OF THE INVENTION

[0008] The present invention provides inter alia a modulator that modulates, i.e., inhibits, the expression and/or activity of inhibin subunit beta E (INHBE) for treating an INHBE-associated disorder, e.g. a metabolic disorder, e.g., metabolic syndrome.

[0009] In one aspect, the present invention provides a modulator of inhibin subunit beta E (INHBE). The modulator may be an oligonucleotide that targets INHBE, such as a double stranded ribonucleic acid (dsRNA) or an antisense polynucleotide agent; an antibody, or antigen-binding fragment thereof, that specifically binds INHBE, such as a monoclonal anti-INHBE antibody, or antigen-binding fragment thereof; a small molecule; a guideRNA that effects ADAR editing, such as a guideRNA that includes a stem loop structure that binds the ADAR enzyme; or a guideRNA that effects CRISPR editing.

[0010] In one embodiment, the antisense polynucleotide agent comprises 4 to 50 contiguous nucleotides, wherein at least one of the contiguous nucleotides is a modified nucleotide, and wherein the nucleotide sequence of the agent is 80% complementary over its entire length to the equivalent region of the nucleotide sequence of any one of SEQ ID NOs:1, 2, 4, 6, 8, or 10.

[0011] In one embodiment, the equivalent region is any one of the target regions of SEQ ID NO:1 provided in Table 4.

[0012] In one embodiment, the antisense polynucleotide agent comprises at least 8 contiguous nucleotides differing by no more than 3 nucleotides from any one of the nucleotide sequences listed in Table 3.

[0013] In one embodiment, substantially all of the nucleotides of the antisense polynucleotide agent are modified nucleotides.

[0014] In one embodiment, all of the nucleotides of the antisense polynucleotide agent are modified nucleotides.

[0015] In one embodiment, the antisense polynucleotide agent is 10 to 40 nucleotides in length.

[0016] In one embodiment, the antisense polynucleotide agent is 10 to 30 nucleotides in length.

[0017] In one embodiment, the antisense polynucleotide agent is 18 to 30 nucleotides in length.

[0018] In one embodiment, the antisense polynucleotide agent is 10 to 24 nucleotides in length.

[0019] In one embodiment, the antisense polynucleotide agent is 18 to 24 nucleotides in length.

[0020] In one embodiment, the antisense polynucleotide agent is 14 to 20 nucleotides in length.

[0021] In one embodiment, the antisense polynucleotide agent is 14 nucleotides in length.

[0022] In one embodiment, the antisense polynucleotide agent is 20 nucleotides in length.

[0023] In one embodiment, the modified nucleotide comprises a modified sugar moiety selected from the group consisting of a 2′-O-methoxyethyl modified sugar moiety, a 2′-methoxy modified sugar moiety, a 2′-O-alkyl modified sugar moiety, and a bicyclic sugar moiety.

[0024] In one embodiment, the bicyclic sugar moiety has a (—CH2-)n group forming a bridge between the 2′ oxygen and the 4′ carbon atoms of the sugar ring, wherein n is 1 or 2 and wherein R is H, CH3 or CH3OCH3.

[0025] In one embodiment, the modified nucleotide is a 5-methylcytosine.

[0026] In one embodiment, the modified nucleotide comprises a modified internucleoside linkage.

[0027] In one embodiment, the modified internucleoside linkage is a phosphorothioate internucleoside linkage.

[0028] In one embodiment, the modulator comprises a plurality of 2′-deoxynucleotides flanked on each side by at least one nucleotide having a modified sugar moiety.

[0029] In one embodiment, the antisense polynucleotide agent is a gapmer comprising a gap segment comprised of linked 2′-deoxynucleotides positioned between a 5′ and a 3′ wing segment.

[0030] In one embodiment, the modified sugar moiety is selected from the group consisting of a 2′-O-methoxyethyl modified sugar moiety, a 2′-methoxy modified sugar moiety, a 2′-O-alkyl modified sugar moiety, and a bicyclic sugar moiety.

[0031] In one embodiment, the 5′-wing segment is 1 to 6 nucleotides in length.

[0032] In one embodiment, the 3′-wing segment is 1 to 6 nucleotides in length.

[0033] In one embodiment, the gap segment is 5 to 14 nucleotides in length.

[0034] In one embodiment, the 5′-wing segment is 2 nucleotides in length.

[0035] In one embodiment, the 3′-wing segment is 2 nucleotides in length.

[0036] In one embodiment, the 5′-wing segment is 3 nucleotides in length.

[0037] In one embodiment, the 3′-wing segment is 3 nucleotides in length.

[0038] In one embodiment, the 5′-wing segment is 4 nucleotides in length.

[0039] In one embodiment, the 3′-wing segment is 4 nucleotides in length.

[0040] In one embodiment, the 5′-wing segment is 5 nucleotides in length.

[0041] In one embodiment, the 3′-wing segment is 5 nucleotides in length.

[0042] In one embodiment, the gap segment is 10 nucleotides in length.

[0043] In one embodiment, the antisense polynucleotide agent comprises a gap segment consisting of linked deoxynucleotides; a 5′-wing segment consisting of linked nucleotides; a 3′-wing segment consisting of linked nucleotides; wherein the gap segment is positioned between the 5′-wing segment and the 3′-wing segment and wherein each nucleotide of each wing segment comprises a modified sugar.

[0044] In one embodiment, the gap segment is ten 2′-deoxynucleotides in length and each of the wing segments is five nucleotides in length.

[0045] In one embodiment, the gap segment is ten 2′-deoxynucleotides in length and each of the wing segments is four nucleotides in length.

[0046] In one embodiment, the gap segment is ten 2′-deoxynucleotides in length and each of the wing segments is three nucleotides in length.

[0047] In one embodiment, the gap segment is ten 2′-deoxynucleotides in length and each of the wing segments is two nucleotides in length.

[0048] In one embodiment, the modified sugar moiety is selected from the group consisting of a 2′-O-methoxyethyl modified sugar moiety, a 2′-methoxy modified sugar moiety, a 2′-O-alkyl modified sugar moiety, and a bicyclic sugar moiety.

[0049] In one embodiment, all of the nucleotides comprise a modified internucleoside linkage.

[0050] In one embodiment, the modulator further comprises a ligand.

[0051] In one embodiment, the modulator is conjugated to the ligand at the 3′-terminus.

[0052] In one embodiment, the ligand is an N-acetylgalactosamine (GalNAc) derivative.

[0053] In one embodiment, the ligand is

[chemical structure]

[0054] The present invention also provides cells containing any of the modulators of the invention and pharmaceutical compositions comprising any of themodulators of the invention.

[0055] The pharmaceutical composition of the invention may include a modulator in an unbuffered solution, e.g., saline or water, or the pharmaceutical composition of the invention may include the modulator in a buffer solution, e.g., a buffer solution comprising acetate, citrate, prolamine, carbonate, or phosphate or any combination thereof; or phosphate buffered saline (PBS). In some embodiments, the pharmaceutical compositions comprises a modulator and a lipid formulation, e.g., the lipid formulation comprises a LNP or the lipid formulation comprises a MC3.

[0056] In one aspect, the present invention provides a method of inhibiting expression and/or activity of inhibin subunit beta E (INHBE) in a cell. The method includes contacting the cell with any of the modulators of the invention or any of the pharmaceutical compositions of the invention, thereby inhibiting expression and/or activity of the INHBE gene in the cell.

[0057] In one embodiment, the cell is within a subject, e.g., a human subject, e.g., a subject having a metabolic disorder, such as diabetes, or cardiovascular disease, such as hypertension

[0058] In certain embodiments, the INHBE expression and/or activity is inhibited by at least about 30%, 40%, 50%, 60%, 70%, 80%, 90%, or 95%. In one embodiment, inhibiting expression and/or activity of INHBE decreases INHBE protein level in serum of the subject by at least 30%, 40%, 50%, 60%, 70%, 80%, 90%, or 95%.

[0059] In one aspect, the present invention provides a method of treating a subject having a disorder that would benefit from reduction in inhibin subunit beta E (INHBE) expression and/or activity. The method includes administering to the subject a therapeutically effective amount of any of the modulators of the invention or any of the pharmaceutical compositions of the invention, thereby treating the subject having the disorder that would benefit from reduction in INHBE expression.

[0060] In another aspect, the present invention provides a method of preventing at least one symptom in a subject having a disorder that would benefit from reduction in inhibin subunit beta E (INHBE) expression and/or activity. The method includes administering to the subject a prophylactically effective amount of any of the modulators of the invention or any of the pharmaceutical compositions of the invention, thereby preventing at least one symptom in the subject having the disorder that would benefit from reduction in INHBE expression.

[0061] In one embodiment, administration of a therapeutically or prophylactically effective amount decreases the waist-to-hip ratio adjusted for body mass index in the subject.

[0062] In certain embodiments, the disorder is a metabolic disorder, e.g. metabolic syndrome, a disorder of carbohydrates, e.g., type II diabetes, pre-diabetes, a lipid metabolism disorder, e.g., a hyperlipidemia, hypertension, a cardiovascular disease, a disorders of body weight.

[0063] In some embodiments, the INHBE-associated disorder is metabolic syndrome.

[0064] In some embodiments, the INHBE-associated disorder is cardiovascular disease.

[0065] In some embodiments, the INHBE-associated disorder is hypertension.

[0066] In certain embodiments, administration of the modulator to the subject causes a decrease INHBE protein accumulation in the subject.

[0067] In a further aspect, the present invention also provides methods of inhibiting the expression and/or activity of INHBE in a subject. The methods include administering to the subject a therapeutically effective amount of any of the modulators provided herein, thereby inhibiting the expression and/or activity of INHBE in the subject.

[0068] In one embodiment, the subject is human.

[0069] In one embodiment, the modulator is administered to the subject at a dose of about 0.01 mg/kg to about 50 mg/kg.

[0070] In one embodiment, the modulator is administered to the subject subcutaneously.

[0071] In one embodiment, the methods of the invention include further determining the level of INHBE in a sample(s) from the subject.

[0072] In one embodiment, the level of INHBE in the subject sample(s) is an INHBE protein level in a blood or serum or liver tissue sample(s).

[0073] In certain embodiments, the methods of the invention further comprise administering to the subject an additional therapeutic agent.

[0074] In certain embodiments, the additional therapeutic agent is selected from the group consisting of insulin, a glucagon-like peptide 1 agonist, a sulfonylurea, a seglitinide, a biguanide, a thiazolidinedione, an alpha-glucosidase inhibitor, an SGLT2 inhibitor, a DPP-4 inhibitor, an HMG-CoA reductase inhibitor, a statin, and a combination of any of the foregoing.

[0075] The present invention also provides kits comprising any of the modulators of the invention or any of the pharmaceutical compositions of the invention, and optionally, instructions for use. In one embodiment, the invention provides a kit for performing a method of inhibiting expression and/or activity of INHBE in a cell by contacting a cell with a modulator of the invention in an amount effective to inhibit expression and/or activity of INHBE in the cell. The kit comprises a modulator and instructions for use and, optionally, means for administering the modulator to a subject.

### DETAILED DESCRIPTION OF THE INVENTION

[0076] The present invention provides compositions comprising a modulator, i.e., inhibitor, of inhibin subunit beta E (INHBE) gene for treating an inhibin subunit beta E (INHBE)-associated disorder, e.g., a metabolic disorder, e.g. metabolic syndrome, a disorder of carbohydrates, e.g., type II diabetes, pre-diabetes, a lipid metabolism disorder, e.g., a hyperlipidemia, hypertension, a cardiovascular disease, a disorders of body weight.

[0077] The following detailed description discloses how to make and use compositions containing modulators to inhibit the expression and/or activity of INHBE as well as compositions, uses, and methods for treating subjects that would benefit from inhibition and/or reduction of the expression and/or activity of INHBE, e.g., subjects susceptible to or diagnosed with an INHBE-associated disorder.

### I. Definitions

[0078] In order that the present invention may be more readily understood, certain terms are first defined. In addition, it should be noted that whenever a value or range of values of a parameter are recited, it is intended that values and ranges intermediate to the recited values are also intended to be part of this invention.

[0079] The articles “a” and “an” are used herein to refer to one or to more than one (i.e., to at least one) of the grammatical object of the article. By way of example, “an element” means one element or more than one element, e.g., a plurality of elements.

[0080] The term “including” is used herein to mean, and is used interchangeably with, the phrase “including but not limited to”.

[0081] The term “or” is used herein to mean, and is used interchangeably with, the term “and/or,” unless context clearly indicates otherwise. For example, “sense strand or antisense strand” is understood as “sense strand or antisense strand or sense strand and antisense strand.”

[0082] The term “about” is used herein to mean within the typical ranges of tolerances in the art. For example, “about” can be understood as about 2 standard deviations from the mean. In certain embodiments, about means±10%. In certain embodiments, about means±5%. When about is present before a series of numbers or a range, it is understood that “about” can modify each of the numbers in the series or range.

[0083] The term “at least”, “no less than”, or “or more” prior to a number or series of numbers is understood to include the number adjacent to the term “at least”, and all subsequent numbers or integers that could logically be included, as clear from context. For example, the number of nucleotides in a nucleic acid molecule must be an integer. For example, “at least 19 nucleotides of a 21 nucleotide nucleic acid molecule” means that 19, 20, or 21 nucleotides have the indicated property. When at least is present before a series of numbers or a range, it is understood that “at least” can modify each of the numbers in the series or range.

[0084] As used herein, “no more than” or “or less” is understood as the value adjacent to the phrase and logical lower values or integers, as logical from context, to zero. For example, a duplex with an overhang of “no more than 2 nucleotides” has a 2, 1, or 0 nucleotide overhang. When “no more than” is present before a series of numbers or a range, it is understood that “no more than” can modify each of the numbers in the series or range. As used herein, ranges include both the upper and lower limit.

[0085] As used herein, methods of detection can include determination that the amount of analyte present is below the level of detection of the method.

[0086] In the event of a conflict between an indicated target site and the nucleotide sequence for a sense or antisense strand, the indicated sequence takes precedence.

[0087] In the event of a conflict between a sequence and its indicated site on a transcript or other sequence, the nucleotide sequence recited in the specification takes precedence.

[0088] As used herein, a “modulator” is a molecule that decreases or increases the expression and/or activity of INHBE.

[0089] As used herein, “inhibin subunit beta E,” used interchangeably with the terms “INHBE,” refers to a growth factor that belongs to the transforming growth factor-β (TGF-β) family. INHBE mRNA is predominantly expressed in the liver (Fang J. et al. Biochemical & Biophysical Res. Comm. 1997; 231(3):655-61), and INHBE is involved in the regulation of liver cell growth and differentiation (Chabicovsky M. et al. Endocrinology. 2003; 144(8):3497-504). INHBE is also known as inhibin beta E chain, activin beta E, inhibin beta E subunit, inhibin beta E, and MGC4638.

[0090] The sequence of a human INHBE mRNA transcript can be found at, for example, GenBank Accession No. GI: 1877089956 (NM 031479.5; SEQ ID NO:1; reverse complement, SEQ ID NO: 2). The sequence of mouse INHBE mRNA can be found at, for example, GenBank Accession No. GI: 1061899809 (NM_008382.3; SEQ ID NO:3; reverse complement, SEQ ID NO:4). The sequence of rat INHBE mRNA can be found at, for example, GenBank Accession No. GI: 148747589 (NM_031815.2; SEQ ID NO:5; reverse complement, SEQ ID NO: 6). The predicted sequence of Macaca mulatta INHBE mRNA can be found at, for example, GenBank Accession No. GI: 1622845604 (XM_001115958.3; SEQ ID NO:7; reverse complement, SEQ ID NO:8).

[0091] Additional examples of INHBE mRNA sequences are readily available through publicly available databases, e.g., GenBank, UniProt, OMIM, and the Macaca genome project web site.

[0092] Further information on INHBE can be found, for example, at www.ncbi.nlm.nih.gov/gene/?term=INHBE.

[0093] The entire contents of each of the foregoing GenBank Accession numbers and the Gene database numbers are incorporated herein by reference as of the date of filing this application.

[0094] The term INHBE, as used herein, also refers to variations of the INHBE gene including variants provided in the SNP database. Numerous sequence variations within the INHBE gene have been identified and may be found at, for example, NCBI dbSNP and UniProt (see, e.g., www.ncbi.nlm.nih.gov/snp/?term=INHBE, the entire contents of which is incorporated herein by reference as of the date of filing this application.

[0095] As used herein, “target sequence” refers to a contiguous portion of the nucleotide sequence of an mRNA molecule formed during the transcription of an INHBE gene, including mRNA that is a product of RNA processing of a primary transcription product.

[0096] In one embodiment, the target portion of the sequence will be at least long enough to serve as a substrate for iRNA-directed cleavage at or near that portion of the nucleotide sequence of an mRNA molecule formed during the transcription of an INHBE gene. In another embodiment, the target sequence is a nucleic acid molecule to which an antisense polynucleotide agent of the invention specifically hybridizes

[0097] The target sequence may be from about 19-36 nucleotides in length, e.g., about 19-30 nucleotides in length. For example, the target sequence can be about 19-30 nucleotides, 19-30, 19-29, 19-28, 19-27, 19-26, 19-25, 19-24, 19-23, 19-22, 19-21, 19-20, 20-30, 20-29, 20-28, 20-27, 20-26, 20-25, 20-24, 20-23, 20-22, 20-21, 21-30, 21-29, 21-28, 21-27, 21-26, 21-25, 21-24, 21-23, or 21-22 nucleotides in length. In certain embodiments, the target sequence is 19-23 nucleotides in length, optionally 21-23 nucleotides in length. Ranges and lengths intermediate to the above recited ranges and lengths are also contemplated to be part of the disclosure.

[0098] As used herein, the term “strand comprising a sequence” refers to an oligonucleotide comprising a chain of nucleotides that is described by the sequence referred to using the standard nucleotide nomenclature.

[0099] “G,” “C,” “A,” “T,” and “U” each generally stand for a nucleotide that contains guanine, cytosine, adenine, thymidine, and uracil as a base, respectively. However, it will be understood that the term “ribonucleotide” or “nucleotide” can also refer to a modified nucleotide, as further detailed below, or a surrogate replacement moiety (see, e.g., Table 1). The skilled person is well aware that guanine, cytosine, adenine, and uracil can be replaced by other moieties without substantially altering the base pairing properties of an oligonucleotide comprising a nucleotide bearing such replacement moiety. For example, without limitation, a nucleotide comprising inosine as its base can base pair with nucleotides containing adenine, cytosine, or uracil. Hence, nucleotides containing uracil, guanine, or adenine can be replaced in the nucleotide sequences of oligonucleotides featured in the invention by a nucleotide containing, for example, inosine. In another example, adenine and cytosine anywhere in the oligonucleotide can be replaced with guanine and uracil, respectively to form G-U Wobble base pairing with the target mRNA. Sequences containing such replacement moieties are suitable for the compositions and methods featured in the invention.

[0100] The terms “iRNA”, “RNAi agent,” “iRNA agent,”, “RNA interference agent” as used interchangeably herein, refer to an agent that contains RNA as that term is defined herein, and which mediates the targeted cleavage of an RNA transcript via an RNA-induced silencing complex (RISC) pathway. iRNA directs the sequence-specific degradation of mRNA through a process known as RNA interference (RNAi). The iRNA modulates, e.g., inhibits, the expression of an INHBE gene in a cell, e.g., a liver cell within a subject, such as a mammalian subject.

[0101] In one embodiment, an RNAi agent of the invention includes a single stranded RNA that interacts with a target RNA sequence, e.g., an INHBE target mRNA sequence, to direct the cleavage of the target RNA. Without wishing to be bound by theory it is believed that long double stranded RNA introduced into cells is broken down into siRNA by a Type III endonuclease known as Dicer (Sharp et al. (2001) Genes Dev. 15:485). Dicer, a ribonuclease-III-like enzyme, processes the dsRNA into 19-23 base pair short interfering RNAs with characteristic two base 3′ overhangs (Bernstein, et al., (2001) Nature 409:363). The siRNAs are then incorporated into an RNA-induced silencing complex (RISC) where one or more helicases unwind the siRNA duplex, enabling the complementary antisense strand to guide target recognition (Nykanen, et al., (2001) Cell 107:309). Upon binding to the appropriate target mRNA, one or more endonucleases within the RISC cleave the target to induce silencing (Elbashir, et al., (2001) Genes Dev. 15:188). Thus, in one aspect the invention relates to a single stranded RNA (siRNA) generated within a cell and which promotes the formation of a RISC complex to effect silencing of the target gene, i.e., an INHBE gene. Accordingly, the term “siRNA” is also used herein to refer to an iRNA as described above.

[0102] In certain embodiments, the RNAi agent may be a single-stranded siRNA (ssRNAi) that is introduced into a cell or organism to inhibit a target mRNA. Single-stranded RNAi agents bind to the RISC endonuclease, Argonaute 2, which then cleaves the target mRNA. The single-stranded siRNAs are generally 15-30 nucleotides and are chemically modified. The design and testing of single-stranded siRNAs are described in U.S. Pat. No. 8,101,348 and in Lima et al., (2012) Cell 150:883-894, the entire contents of each of which are hereby incorporated herein by reference. Any of the antisense nucleotide sequences described herein may be used as a single-stranded siRNA as described herein or as chemically modified by the methods described in Lima et al., (2012) Cell 150:883-894.

[0103] In certain embodiments, an “iRNA” for use in the compositions, uses, and methods of the invention is a double stranded RNA and is referred to herein as a “double stranded RNA agent,” “double stranded RNA (dsRNA) molecule,” “dsRNA agent,” or “dsRNA”. The term “dsRNA”, refers to a complex of ribonucleic acid molecules, having a duplex structure comprising two anti-parallel and substantially complementary nucleic acid strands, referred to as having “sense” and “antisense” orientations with respect to a target RNA, i.e., an INHBE gene. In some embodiments of the invention, a double stranded RNA (dsRNA) triggers the degradation of a target RNA, e.g., an mRNA, through a post-transcriptional gene-silencing mechanism referred to herein as RNA interference or RNAi.

[0104] In general, the majority of nucleotides of an oligonucleotide of the invention, e.g., each strand of a dsRNA molecule, are ribonucleotides, but as described in detail herein, each or both strands can also include one or more non-ribonucleotides, e.g., a deoxyribonucleotide or a modified nucleotide. In addition, as used in this specification, an “iRNA” or an “antisense polynucleotide agent” may include ribonucleotides with chemical modifications; an iRNA or antisense polynucleotide agent may include substantial modifications at multiple nucleotides. As used herein, the term “modified nucleotide” refers to a nucleotide having, independently, a modified sugar moiety, a modified internucleotide linkage, or modified nucleobase, or any combination thereof. Thus, the term modified nucleotide encompasses substitutions, additions or removal of, e.g., a functional group or atom, to internucleoside linkages, sugar moieties, or nucleobases. The modifications suitable for use in the agents of the invention include all types of modifications disclosed herein or known in the art. Any such modifications, as used in a siRNA type molecule, are encompassed by “iRNA” or “RNAi agent” or “antisense polynucleotide agent” for the purposes of this specification and claims.

[0105] In certain embodiments of the instant disclosure, inclusion of a deoxy-nucleotide if present within an RNAi agent or antisense polynucleotide agent can be considered to constitute a modified nucleotide.

[0106] The duplex region of an RNAi agent may be of any length that permits specific degradation of a desired target RNA through a RISC pathway, and may range from about 19 to 36 base pairs in length, e.g., about 19-30 base pairs in length, for example, about 9, 10, 11, 12, 13, 14, 15, 16, 17, 18, 19, 20, 21, 22, 23, 24, 25, 26, 27, 28, 29, 30, 31, 32, 33, 34, 35, or 36 base pairs in length, such as about 19-30, 19-29, 19-28, 19-27, 19-26, 19-25, 19-24, 19-23, 19-22, 19-21, 19-20, 20-30, 20-29, 20-28, 20-27, 20-26, 20-25, 20-24, 20-23, 20-22, 20-21, 21-30, 21-29, 21-28, 21-27, 21-26, 21-25, 21-24, 21-23, or 21-22 base pairs in length. In certain embodiments, the duplex region is 19-21 base pairs in length, e.g., 21 base pairs in length. Ranges and lengths intermediate to the above recited ranges and lengths are also contemplated to be part of the disclosure.

[0107] The two strands forming the duplex structure of an RNAi molecule may be different portions of one larger RNA molecule, or they may be separate RNA molecules. Where the two strands are part of one larger molecule, and therefore are connected by an uninterrupted chain of nucleotides between the 3′-end of one strand and the 5′-end of the respective other strand forming the duplex structure, the connecting RNA chain is referred to as a “hairpin loop.” A hairpin loop can comprise at least one unpaired nucleotide. In some embodiments, the hairpin loop can comprise at least 2, 3, 4, 5, 6, 7, 8, 9, 10, 20, 23 or more unpaired nucleotides. In some embodiments, the hairpin loop can be 10 or fewer nucleotides. In some embodiments, the hairpin loop can be 8 or fewer unpaired nucleotides. In some embodiments, the hairpin loop can be 4-10 unpaired nucleotides. In some embodiments, the hairpin loop can be 4-8 nucleotides.

[0108] Where the two substantially complementary strands of a dsRNA are comprised by separate RNA molecules, those molecules need not be, but can be covalently connected. Where the two strands are connected covalently by means other than an uninterrupted chain of nucleotides between the 3′-end of one strand and the 5′-end of the respective other strand forming the duplex structure, the connecting structure is referred to as a “linker.” The RNA strands may have the same or a different number of nucleotides. The maximum number of base pairs is the number of nucleotides in the shortest strand of the dsRNA minus any overhangs that are present in the duplex. In addition to the duplex structure, an RNAi may comprise one or more nucleotide overhangs. In one embodiment of the RNAi agent, at least one strand comprises a 3′ overhang of at least 1 nucleotide. In another embodiment, at least one strand comprises a 3′ overhang of at least 2 nucleotides, e.g., 2, 3, 4, 5, 6, 7, 9, 10, 11, 12, 13, 14, or 15 nucleotides. In other embodiments, at least one strand of the RNAi agent comprises a 5′ overhang of at least 1 nucleotide. In certain embodiments, at least one strand comprises a 5′ overhang of at least 2 nucleotides, e.g., 2, 3, 4, 5, 6, 7, 9, 10, 11, 12, 13, 14, or 15 nucleotides. In still other embodiments, both the 3′ and the 5′ end of one strand of the RNAi agent comprise an overhang of at least 1 nucleotide.

[0109] In certain embodiments, an iRNA agent of the invention is a dsRNA, each strand of which comprises 19-23 nucleotides, that interacts with a target RNA sequence, e.g., an INHBE gene, to direct cleavage of the target RNA.

[0110] In some embodiments, an iRNA of the invention is a dsRNA of 24-30 nucleotides that interacts with a target RNA sequence, e.g., an INHBE target mRNA sequence, to direct the cleavage of the target RNA.

[0111] As used herein, the term “nucleotide overhang” refers to at least one unpaired nucleotide that protrudes from the duplex structure of a double stranded iRNA. For example, when a 3-end of one strand of a dsRNA extends beyond the 5-end of the other strand, or vice versa, there is a nucleotide overhang. A dsRNA can comprise an overhang of at least one nucleotide; alternatively the overhang can comprise at least two nucleotides, at least three nucleotides, at least four nucleotides, at least five nucleotides or more. A nucleotide overhang can comprise or consist of a nucleotide/nucleoside analog, including a deoxynucleotide/nucleoside. The overhang(s) can be on the sense strand, the antisense strand, or any combination thereof. Furthermore, the nucleotide(s) of an overhang can be present on the 5-end, 3-end, or both ends of either an antisense or sense strand of a dsRNA.

[0112] In one embodiment, the antisense strand of a dsRNA has a 1-10 nucleotide, e.g., a 1, 2, 3, 4, 5, 6, 7, 8, 9, or 10 nucleotide, overhang at the 3′-end or the 5′-end. In one embodiment, the sense strand of a dsRNA has a 1-10 nucleotide, e.g., a 1, 2, 3, 4, 5, 6, 7, 8, 9, or 10 nucleotide, overhang at the 3′-end or the 5′-end. In another embodiment, one or more of the nucleotides in the overhang is replaced with a nucleoside thiophosphate.

[0113] In certain embodiments, the antisense strand of a dsRNA has a 1-10 nucleotide, e.g., 0-3, 1-3, 2-4, 2-5, 4-10, 5-10, e.g., a 1, 2, 3, 4, 5, 6, 7, 8, 9, or 10 nucleotide, overhang at the 3′-end or the 5′-end. In one embodiment, the sense strand of a dsRNA has a 1-10 nucleotide, e.g., a 1, 2, 3, 4, 5, 6, 7, 8, 9, or 10 nucleotide, overhang at the 3′-end or the 5′-end. In another embodiment, one or more of the nucleotides in the overhang is replaced with a nucleoside thiophosphate.

[0114] In certain embodiments, the antisense strand of a dsRNA has a 1-10 nucleotides, e.g., a 1, 2, 3, 4, 5, 6, 7, 8, 9, or 10 nucleotide, overhang at the 3′-end or the 5′-end. In certain embodiments, the overhang on the sense strand or the antisense strand, or both, can include extended lengths longer than 10 nucleotides, e.g., 1-30 nucleotides, 2-30 nucleotides, 10-30 nucleotides, 10-25 nucleotides, 10-20 nucleotides, or 10-15 nucleotides in length. In certain embodiments, an extended overhang is on the sense strand of the duplex. In certain embodiments, an extended overhang is present on the 3′ end of the sense strand of the duplex. In certain embodiments, an extended overhang is present on the 5′ end of the sense strand of the duplex. In certain embodiments, an extended overhang is on the antisense strand of the duplex. In certain embodiments, an extended overhang is present on the 3′end of the antisense strand of the duplex. In certain embodiments, an extended overhang is present on the 5′end of the antisense strand of the duplex. In certain embodiments, one or more of the nucleotides in the extended overhang is replaced with a nucleoside thiophosphate. In certain embodiments, the overhang includes a self-complementary portion such that the overhang is capable of forming a hairpin structure that is stable under physiological conditions.

[0115] “Blunt” or “blunt end” means that there are no unpaired nucleotides at that end of the double stranded RNA agent, i.e., no nucleotide overhang. A “blunt ended” double stranded RNA agent is double stranded over its entire length, i.e., no nucleotide overhang at either end of the molecule. The RNAi agents of the invention include RNAi agents with no nucleotide overhang at one end (i.e., agents with one overhang and one blunt end) or with no nucleotide overhangs at either end. Most often such a molecule will be double-stranded over its entire length.

[0116] The term “antisense strand” or “guide strand” refers to the strand of an iRNA, e.g., a dsRNA, which includes a region that is substantially complementary to a target sequence, e.g., an INHBE mRNA.

[0117] As used herein, the term “region of complementarity” refers to the region on the antisense strand of a dsRNA agent or the region of an antisense polynucleotide agent that is substantially complementary to a sequence, for example a target sequence, e.g., an INHBE nucleotide sequence, as defined herein. Where the region of complementarity is not fully complementary to the target sequence, the mismatches can be in the internal or terminal regions of the molecule. Generally, the most tolerated mismatches are in the terminal regions, e.g., within 5, 4, or 3 nucleotides of the 5′- or 3′-end of the iRNA. In some embodiments, a double stranded RNA agent or antisense polynucleotide agent of the invention includes a nucleotide mismatch in the antisense strand. In some embodiments, the antisense strand of the double stranded RNA agent antisense polynucleotide agent of the invention includes no more than 4 mismatches with the target mRNA, e.g., the antisense strand includes 4, 3, 2, 1, or 0 mismatches with the target mRNA. In some embodiments, the antisense strand double stranded RNA agent of the invention includes no more than 4 mismatches with the sense strand, e.g., the antisense strand includes 4, 3, 2, 1, or 0 mismatches with the sense strand. In some embodiments, a double stranded RNA agent of the invention includes a nucleotide mismatch in the sense strand. In some embodiments, the sense strand of the double stranded RNA agent of the invention includes no more than 4 mismatches with the antisense strand, e.g., the sense strand includes 4, 3, 2, 1, or 0 mismatches with the antisense strand. In some embodiments, the nucleotide mismatch is, for example, within 5, 4, 3 nucleotides from the 3′-end of the iRNA. In another embodiment, the nucleotide mismatch is, for example, in the 3′-terminal nucleotide of the iRNA agent. In some embodiments, the mismatch(s) is not in the seed region.

[0118] Thus, an RNAi agent or antisense polynucleotide agent as described herein can contain one or more mismatches to the target sequence. In one embodiment, an RNAi agent or antisense polynucleotide agent as described herein contains no more than 3 mismatches (i.e., 3, 2, 1, or 0 mismatches). In one embodiment, an RNAi agent or antisense polynucleotide agent as described herein contains no more than 2 mismatches. In one embodiment, an RNAi agent or antisense polynucleotide agent as described herein contains no more than 1 mismatch. In one embodiment, an RNAi agent or antisense polynucleotide agent as described herein contains 0 mismatches. In certain embodiments, if the antisense strand of the RNAi agent or antisense polynucleotide agent contains mismatches to the target sequence, the mismatch can optionally be restricted to be within the last 5 nucleotides from either the 5′- or 3′-end of the region of complementarity. For example, in such embodiments, for a 23 nucleotide RNAi agent, the strand which is complementary to a region of an INHBE gene, generally does not contain any mismatch within the central 13 nucleotides. The methods described herein or methods known in the art can be used to determine whether an RNAi agent or antisense polynucleotide agent containing a mismatch to a target sequence is effective in inhibiting the expression of an INHBE gene. Consideration of the efficacy of RNAi agents or antisense polynucleotide agent with mismatches in inhibiting expression of an INHBE gene is important, especially if the particular region of complementarity in an INHBE gene is known to have polymorphic sequence variation within the population.

[0119] The term “sense strand” or “passenger strand” as used herein, refers to the strand of an iRNA that includes a region that is substantially complementary to a region of the antisense strand as that term is defined herein.

[0120] As used herein, “substantially all of the nucleotides are modified” are largely but not wholly modified and can include not more than 5, 4, 3, 2, or 1 unmodified nucleotides.

[0121] As used herein, the term “cleavage region” refers to a region that is located immediately adjacent to the cleavage site. The cleavage site is the site on the target at which cleavage occurs. In some embodiments, the cleavage region comprises three bases on either end of, and immediately adjacent to, the cleavage site. In some embodiments, the cleavage region comprises two bases on either end of, and immediately adjacent to, the cleavage site. In some embodiments, the cleavage site specifically occurs at the site bound by nucleotides 10 and 11 of the antisense strand, and the cleavage region comprises nucleotides 11, 12 and 13.

[0122] As used herein, and unless otherwise indicated, the term “complementary,” when used to describe a first nucleotide sequence in relation to a second nucleotide sequence, refers to the ability of an oligonucleotide or polynucleotide comprising the first nucleotide sequence to hybridize and form a duplex structure under certain conditions with an oligonucleotide or polynucleotide comprising the second nucleotide sequence, as will be understood by the skilled person. Such conditions can, for example, be stringent conditions, where stringent conditions can include: 400 mM NaCl, 40 mM PIPES pH 6.4, 1 mM EDTA, 50° C. or 70° C. for 12-16 hours followed by washing (see, e.g., “Molecular Cloning: A Laboratory Manual, Sambrook, et al. (1989) Cold Spring Harbor Laboratory Press). Other conditions, such as physiologically relevant conditions as can be encountered inside an organism, can apply. The skilled person will be able to determine the set of conditions most appropriate for a test of complementarity of two sequences in accordance with the ultimate application of the hybridized nucleotides.

[0123] Complementary sequences as described herein, include base-pairing of the oligonucleotide or polynucleotide comprising a first nucleotide sequence to an oligonucleotide or polynucleotide comprising a second nucleotide sequence over the entire length of one or both nucleotide sequences. Such sequences can be referred to as “fully complementary” with respect to each other herein. However, where a first sequence is referred to as “substantially complementary” with respect to a second sequence herein, the two sequences can be fully complementary, or they can form one or more, but generally not more than 5, 4, 3, or 2 mismatched base pairs upon hybridization for a duplex up to 30 base pairs, while retaining the ability to hybridize under the conditions most relevant to their ultimate application, e.g., inhibition of gene expression, in vitro or in vivo. However, where two oligonucleotides are designed to form, upon hybridization, one or more single stranded overhangs, such overhangs shall not be regarded as mismatches with regard to the determination of complementarity. For example, a dsRNA comprising one oligonucleotide 21 nucleotides in length and another oligonucleotide 23 nucleotides in length, wherein the longer oligonucleotide comprises a sequence of 21 nucleotides that is fully complementary to the shorter oligonucleotide, can yet be referred to as “fully complementary” for the purposes described herein.

[0124] “Complementary” sequences, as used herein, can also include, or be formed entirely from, non-Watson-Crick base pairs or base pairs formed from non-natural and modified nucleotides, in so far as the above requirements with respect to their ability to hybridize are fulfilled. Such non-Watson-Crick base pairs include, but are not limited to, G:U Wobble or Hoogsteen base pairing.

[0125] The terms “complementary,” “fully complementary” and “substantially complementary” herein can be used with respect to the base matching between the sense strand and the antisense strand of a dsRNA, or between two oligonucleotides or polynucleotides, such as the antisense strand of a double stranded RNA agent and a target sequence, as will be understood from the context of their use.

[0126] As used herein, a polynucleotide that is “substantially complementary to at least part of” a messenger RNA (mRNA) refers to a polynucleotide that is substantially complementary to a contiguous portion of the mRNA of interest (e.g., an mRNA encoding an INHBE gene). For example, a polynucleotide is complementary to at least a part of an INHBE mRNA if the sequence is substantially complementary to a non-interrupted portion of an mRNA encoding an INHBE gene.

[0127] Accordingly, in some embodiments, the antisense polynucleotides disclosed herein are fully complementary to the target INHBE sequence. In other embodiments, the antisense polynucleotides disclosed herein are substantially complementary to the target INHBE sequence and comprise a contiguous nucleotide sequence which is at least 80% complementary over its entire length to the equivalent region of the nucleotide sequence of any one of SEQ ID NOs:1, 3, 5, 7, or 9, or a fragment of any one of SEQ ID NOs:1, 3, 5, 7, or 9, such as about 85%, about 90%, about 91%, about 92%, about 93%, about 94%, about 95%, about 96%, about 97%, about 98%, or about 99% complementary.

[0128] In other embodiments, the antisense polynucleotides disclosed herein are substantially complementary to the target INHBE sequence and comprise a contiguous nucleotide sequence which is at least about 80% complementary over its entire length to any one of the sense strand nucleotide sequences in any one of any one of Tables 2-5, or a fragment of any one of the sense strand nucleotide sequences in any one of Tables 2-5, such as about 85%, about 90%, about 91%, about 92%, about 93%, about 94%, about 95%, about 96%, about 97%, about 98%, about 99%, or 100% complementary.

[0129] In one embodiment, an RNAi agent of the disclosure includes a sense strand that is substantially complementary to an antisense polynucleotide which, in turn, is the same as a target INHBE sequence, and wherein the sense strand polynucleotide comprises a contiguous nucleotide sequence which is at least about 80% complementary over its entire length to the equivalent region of the nucleotide sequence of SEQ ID NOs: 2, 4, 6, 8, or 10, or a fragment of any one of SEQ ID NOs:2, 4, 6, 8, or 10, such as about 85%, about 90%, about 91%, about 92%, about 93%, about 94%, about 95%, about 96%, about 97%, about 98%, about 99%, or 100% complementary.

[0130] In some embodiments, an iRNA of the invention includes a sense strand that is substantially complementary to an antisense polynucleotide which, in turn, is complementary to a target INHBE sequence, and wherein the sense strand polynucleotide comprises a contiguous nucleotide sequence which is at least about 80% complementary over its entire length to any one of the antisense strand nucleotide sequences in any one of any one of Tables 2-3, or a fragment of any one of the antisense strand nucleotide sequences in any one of Tables 2-3, such as about 85%, about 90%, about 91%, about 92%, about 93%, about 94%, about 95%, about 96%, about 97%, about 98%, about 99%, or 100% complementary.

[0131] In general, an “iRNA” includes ribonucleotides with chemical modifications. Such modifications may include all types of modifications disclosed herein or known in the art. Any such modifications, as used in a dsRNA molecule, are encompassed by “iRNA” for the purposes of this specification and claims.

[0132] In certain embodiments of the instant disclosure, inclusion of a deoxy-nucleotide if present within an RNAi agent can be considered to constitute a modified nucleotide.

[0133] The terms “polynucleotide agent,” “antisense polynucleotide agent” “antisense compound”, and “agent” as used interchangeably herein, refer to an agent comprising a single-stranded oligonucleotide that contains RNA as that term is defined herein, and which targets nucleic acid molecules encoding INHBE (e.g., mRNA encoding INHBE as provided in, for example, any one of SEQ ID NOs:1, 3, 5, 7, or 9). The antisense polynucleotide agents specifically bind to the target nucleic acid molecules via hydrogen bonding (e.g., Watson-Crick, Hoogsteen, or reversed Hoogsteen hydrogen bonding) and interfere with the normal function of the targeted nucleic acid (e.g., by an antisense mechanism of action). This interference with or modulation of the function of a target nucleic acid by the polynucleotide agents of the present invention is referred to as “antisense inhibition.”

[0134] The functions of the target nucleic acid molecule to be interfered with may include functions such as, for example, translocation of the RNA to the site of protein translation, translation of protein from the RNA, splicing of the RNA to yield one or more mRNA species, and catalytic activity which may be engaged in or facilitated by the RNA.

[0135] In some embodiments, antisense inhibition refers to “inhibiting the expression” of target nucleic acid levels or target protein levels in a cell, e.g., a cell within a subject, such as a mammalian subject, in the presence of the antisense polynucleotide agent complementary to a target nucleic acid as compared to target nucleic acid levels or target protein levels in the absence of the antisense polynucleotide agent. For example, the antisense polynucleotide agents of the invention can inhibit translation in a stoichiometric manner by base pairing to the mRNA and physically obstructing the translation machinery, see Dias, N. et al., (2002) Mol Cancer Ther 1:347-355.

[0136] The term “antibody” is used herein in its broadest sense and includes certain types of immunoglobulin molecules comprising one or more antigen-binding domains that specifically bind to an antigen or epitope. The term antibody as used herein refers to a molecule comprising at least complementarity-determining region (CDR) 1, CDR2, and CDR3 of a single domain antibody (sdAb), wherein the molecule is capable of binding to an antigen. The term antibody also refers to molecules comprising at least CDR1, CDR2, and CDR3 of a heavy chain and CDR1, CDR2, and CDR3 of a light chain, wherein the molecule is capable of binding to an antigen. The term antibody also includes fragments that are capable of binding an antigen, such as Fv, single-chain Fv (scFv), Fab, Fab′, and (Fab′)2. The term antibody also includes chimeric antibodies, humanized antibodies, and antibodies of various species such as mouse, human, cynomolgus monkey, llama, camel, etc. The term also includes multivalent antibodies such as bivalent or tetravalent antibodies. A multivalent antibody includes, e.g., a single polypeptide chain comprising multiple antigen binding (CDR-containing) domains, as well as two or more polypeptide chains, each containing one or more antigen binding domains, such two or more polypeptide chains being associated with one another, e.g., through a hinge region capable of forming disulfide bond(s) or any other covalent or noncovalent interaction.

[0137] The term “heavy chain variable region” as used herein refers to a region comprising heavy chain CDR1, framework (FR) 2, CDR2, FR3, and CDR3. In some embodiments, a heavy chain variable region also comprises at least a portion of an FR1 and/or at least a portion of an FR4. In some embodiments, a heavy chain CDR1 corresponds to Kabat residues 26 to 35; a heavy chain CDR2 corresponds to Kabat residues 50 to 65; and a heavy chain CDR3 corresponds to Kabat residues 95 to 102. See, e.g., Kabat Sequences of Proteins of Immunological Interest (1987 and 1991, NIH, Bethesda, Md.); and FIG. 1. In some embodiments, a heavy chain CDR1 corresponds to Kabat residues 31 to 35; a heavy chain CDR2 corresponds to Kabat residues 50 to 65; and a heavy chain CDR3 corresponds to Kabat residues 95 to 102. See id.

[0138] The term “heavy chain constant region” as used herein refers to a region comprising at least three heavy chain constant domains, CH1, CH2, and CH3. Nonlimiting exemplary heavy chain constant regions include γ, δ, and α. Nonlimiting exemplary heavy chain constant regions also include ε and μ. Each heavy constant region corresponds to an antibody isotype. For example, an antibody comprising a γ constant region is an IgG antibody, an antibody comprising a δ constant region is an IgD antibody, and an antibody comprising an α constant region is an IgA antibody. Further, an antibody comprising a constant region is an IgM antibody, and an antibody comprising an a constant region is an IgE antibody. Certain isotypes can be further subdivided into subclasses. For example, IgG antibodies include, but are not limited to, IgG1 (comprising a γ1 constant region), IgG2 (comprising a γ2 constant region), IgG3 (comprising a γ3 constant region), and IgG4 (comprising a γ4 constant region) antibodies; IgA antibodies include, but are not limited to, IgA1 (comprising an al constant region) and IgA2 (comprising an α2 constant region) antibodies; and IgM antibodies include, but are not limited to, IgM1 and IgM2.

[0139] The term “heavy chain” (abbreviated HC) as used herein refers to a polypeptide comprising at least a heavy chain variable region, with or without a leader sequence. In some embodiments, a heavy chain comprises at least a portion of a heavy chain constant region. The term “full-length heavy chain” as used herein refers to a polypeptide comprising a heavy chain variable region and a heavy chain constant region, with or without a leader sequence.

[0140] The term “light chain variable region” as used herein refers to a region comprising light chain CDR1, framework (FR)2, CDR2, FR3, and CDR3. In some embodiments, a light chain variable region also comprises an FR1 and/or an FR4. In some embodiments, a light chain CDR1 corresponds to Kabat residues 24 to 34; a light chain CDR2 corresponds to Kabat residues 50 to 56; and a light chain CDR3 corresponds to Kabat residues 89 to 97. See, e.g., Kabat Sequences of Proteins of Immunological Interest (1987 and 1991, NIH, Bethesda, Md.).

[0141] The term “light chain constant region” as used herein refers to a region comprising a light chain constant domain, CL. Nonlimiting exemplary light chain constant regions include λ and κ.

[0142] The term “light chain” (abbreviate LC) as used herein refers to a polypeptide comprising at least a light chain variable region, with or without a leader sequence. In some embodiments, a light chain comprises at least a portion of a light chain constant region. The term “full-length light chain” as used herein refers to a polypeptide comprising a light chain variable region and a light chain constant region, with or without a leader sequence.

[0143] An “isolated antibody”, as used herein, is intended to refer to an antibody that is substantially free of other antibodies having different antigenic specificities (e.g., an isolated antibody that specifically binds INHBE is substantially free of antibodies that specifically bind antigens other than INHBE). An isolated antibody that specifically binds INHBE may, however, have cross-reactivity to other antigens, such as INHBE molecules from other species. Moreover, an isolated antibody may be substantially free of other cellular material and/or chemicals.

[0144] A “chimeric antibody” as used herein refers to an antibody comprising at least one variable region from a first species (such as mouse, rat, cynomolgus monkey, etc.) and at least one constant region from a second species (such as human, cynomolgus monkey, etc.). In some embodiments, a chimeric antibody comprises at least one mouse variable region and at least one human constant region. In some embodiments, a chimeric antibody comprises at least one cynomolgus variable region and at least one human constant region. In some embodiments, a chimeric antibody comprises at least one rat variable region and at least one mouse constant region. In some embodiments, all of the variable regions of a chimeric antibody are from a first species and all of the constant regions of the chimeric antibody are from a second species.

[0145] A “humanized antibody” as used herein refers to an antibody in which at least one amino acid in a framework region of a non-human variable region has been replaced with the corresponding amino acid from a human variable region. In some embodiments, a humanized antibody comprises at least one human constant region or fragment thereof. In some embodiments, a humanized antibody is a sdAb, a Fab, an scFv, a (Fab′)2, etc. The humanized antibody can be selected from any class of immunoglobulins, including IgM, IgG, IgD, IgA and IgE, and any isotype, including without limitation IgG1, IgG2, IgG3 and IgG4. The humanized antibody may comprise sequences from more than one class or isotype, and particular constant domains may be selected to optimize desired effector functions using techniques well-known in the art.

[0146] A “human antibody” as used herein refers to antibodies produced in humans, antibodies produced in non-human animals that comprise human immunoglobulin genes, such as XenoMouse®, and antibodies selected using in vitro methods, such as phage display, wherein the antibody repertoire is based on a human immunoglobulin sequences.

[0147] The terms “an antibody, or antigen binding fragment thereof, that specifically binds INHBE,” or “an anti-INHBE antibody or antigen binding fragment thereof,” used interchangeably herein, refer to an antibody, or antigen binding fragment thereof, that specifically binds to INHBE, e.g., human INHBE. An antibody “which binds” an antigen of interest, i.e., INHBE, is one capable of binding that antigen with sufficient affinity such that the antibody is useful in targeting a cell expressing the antigen. In certain embodiments, the antibody specifically binds to human INHBE. Unless otherwise indicated, the term “anti-INHBE antibody” is meant to refer to an antibody which binds to wild type INHBE, a variant, or an isoform of INHBE.

[0148] In one embodiment, the phrase “specifically binds to INHBE” or “specific binding to INHBE”, as used herein, refers to the ability of an anti-INHBE antibody to interact with INHBE with a dissociation constant (K_{D}) of about 2,000 nM or less, about 1,000 nM or less, about 500 nM or less, about 200 nM or less, about 100 nM or less, about 75 nM or less, about 25 nM or less, about 21 nM or less, about 12 nM or less, about 11 nM or less, about 10 nM or less, about 9 nM or less, about 8 nM or less, about 7 nM or less, about 6 nM or less, about 5 nM or less, about 4 nM or less, about 3 nM or less, about 2 nM or less, about 1 nM or less, about 0.5 nM or less, about 0.3 nM or less, about 0.1 nM or less, about 0.01 nM or less, or about 0.001 nM or less. In another embodiment, the phrase “specifically binds to INHBE” or “specific binding to INHBE”, as used herein, refers to the ability of an anti-INHBE antibody to interact with INHBE with a dissociation constant (K_{D}) of between about 1 pM (0.001 nM) to 2,000 nM, between about 500 pM (0.5 nM) to 1,000 nM, between about 500 pM (0.5 nM) to 500 nM, between about 1 nM) to 200 nM, between about 1 nM to 100 nM, between about 1 nM to 50 nM, between about 1 nM to 20 nM, or between about 1 nM to 5 nM. In one embodiment, K_{D} is determined by surface plasmon resonance or by any other method known in the art.

[0149] The terms “Kabat numbering,” “Kabat definitions,” and “Kabat labeling” are used interchangeably herein. These terms, which are recognized in the art, refer to a system of numbering amino acid residues which are more variable (i.e., hypervariable) than other amino acid residues in the heavy and light chain variable regions of an antibody, or an antigen binding portion thereof (Kabat et al. (1971) Ann. NY Acad, Sci. 190:382-391 and, Kabat, E. A., et al. (1991) Sequences of Proteins of Immunological Interest, Fifth Edition, U.S. Department of Health and Human Services, NIH Publication No. 91-3242). For the heavy chain variable region, the hypervariable region ranges from amino acid positions 31 to 35 for CDR1, amino acid positions 50 to 65 for CDR2, and amino acid positions 95 to 102 for CDR3. For the light chain variable region, the hypervariable region ranges from amino acid positions 24 to 34 for CDR1, amino acid positions 50 to 56 for CDR2, and amino acid positions 89 to 97 for CDR3.

[0150] As used herein, the term “CDR” refers to the complementarity determining region within antibody variable sequences. There are three CDRs in each of the variable regions of the heavy chain (HC) and the light chain (LC), which are designated CDR1, CDR2 and CDR3 (or specifically HC CDR1, HC CDR2, HC CDR3, LC CDR1, LC CDR2, and LC CDR3), for each of the variable regions. The term “CDR set” as used herein refers to a group of three CDRs that occur in a single variable region capable of binding the antigen. The exact boundaries of these CDRs have been defined differently according to different systems. The system described by Kabat (Kabat et al., Sequences of Proteins of Immunological Interest (National Institutes of Health, Bethesda, Md. (1987) and (1991)) not only provides an unambiguous residue numbering system applicable to any variable region of an antibody, but also provides precise residue boundaries defining the three CDRs. These CDRs may be referred to as Kabat CDRs. Chothia and coworkers (Chothia & Lesk, J. Mol. Biol. 196:901-917 (1987) and Chothia et al., Nature 342:877-883 (1989)) found that certain sub-portions within Kabat CDRs adopt nearly identical peptide backbone conformations, despite having great diversity at the level of amino acid sequence. These sub-portions were designated as L1, L2 and L3 or H1, H2 and H3 where the “L” and the “H” designates the light chain and the heavy chains regions, respectively. These regions may be referred to as Chothia CDRs, which have boundaries that overlap with Kabat CDRs. Other boundaries defining CDRs overlapping with the Kabat CDRs have been described by Padlan (FASEB J. 9:133-139 (1995)) and MacCallum (J Mol Biol 262(5):732-45 (1996)). Still other CDR boundary definitions may not strictly follow one of the above systems, but will nonetheless overlap with the Kabat CDRs, although they may be shortened or lengthened in light of prediction or experimental findings that particular residues or groups of residues or even entire CDRs do not significantly impact antigen binding. The methods used herein may utilize CDRs defined according to any of these systems, although preferred embodiments use Kabat or Chothia defined CDRs.

[0151] As used herein, the term “framework” or “framework sequence” refers to the remaining sequences of a variable region minus the CDRs. Because the exact definition of a CDR sequence can be determined by different systems, the meaning of a framework sequence is subject to correspondingly different interpretations. The six CDRs (CDR-L1, CDR-L2, and CDR-L3 of light chain and CDR-H1, CDR-H2, and CDR-H3 of heavy chain) also divide the framework regions on the light chain and the heavy chain into four sub-regions (FR1, FR2, FR3 and FR4) on each chain, in which CDR1 is positioned between FR1 and FR2, CDR2 between FR2 and FR3, and CDR3 between FR3 and FR4. Without specifying the particular sub-regions as FR1, FR2, FR3 or FR4, a framework region, as referred by others, represents the combined FR's within the variable region of a single, naturally occurring immunoglobulin chain. As used herein, a FR represents one of the four sub-regions, and FRs represents two or more of the four sub-regions constituting a framework region.

[0152] The framework and CDR regions of a humanized antibody need not correspond precisely to the parental sequences, e.g., the donor antibody CDR or the consensus framework may be mutagenized by substitution, insertion and/or deletion of at least one amino acid residue so that the CDR or framework residue at that site does not correspond to either the donor antibody or the consensus framework. In a preferred embodiment, such mutations, however, will not be extensive. Usually, at least 80%, preferably at least 85%, more preferably at least 90%, and most preferably at least 95% of the humanized antibody residues will correspond to those of the parental FR and CDR sequences. As used herein, the term “consensus framework” refers to the framework region in the consensus immunoglobulin sequence. As used herein, the term “consensus immunoglobulin sequence” refers to the sequence formed from the most frequently occurring amino acids (or nucleotides) in a family of related immunoglobulin sequences (See e.g., Winnaker, From Genes to Clones (Verlagsgesellschaft, Weinheim, Germany 1987). In a family of immunoglobulins, each position in the consensus sequence is occupied by the amino acid occurring most frequently at that position in the family. If two amino acids occur equally frequently, either can be included in the consensus sequence.

[0153] The term “epitope” refers to a region of an antigen that is bound by an antibody, or an antibody fragment. In certain embodiments, epitope determinants include chemically active surface groupings of molecules such as amino acids, sugar side chains, phosphoryl, or sulfonyl, and, in certain embodiments, may have specific three dimensional structural characteristics, and/or specific charge characteristics. In certain embodiments, an antibody is said to specifically bind an antigen when it preferentially recognizes its target antigen in a complex mixture of proteins and/or macromolecules.

[0154] The term “surface plasmon resonance”, as used herein, refers to an optical phenomenon that allows for the analysis of real-time biospecific interactions by detection of alterations in protein concentrations within a biosensor matrix, for example using the BIAcore system (Pharmacia Biosensor AB, Uppsala, Sweden and Piscataway, NJ). For further descriptions, see Jönsson, U., et al. (1993) Ann. Biol. Clin. 51:19-26; Jönsson, U., et al. (1991) Biotechniques 11:620-627; Johnsson, B., et al. (1995) J. Mol. Recognit. 8:125-131; and Johnnson, B., et al. (1991) Anal. Biochem. 198:268-277.

[0155] The term “kₒₙ” or “kₐ”, as used herein, is intended to refer to the on rate constant for association of an antibody to the antigen to form the antibody/antigen complex.

[0156] The term “k_{off}” or “k_{d}”, as used herein, is intended to refer to the off rate constant for dissociation of an antibody from the antibody/antigen complex.

[0157] The term “K_{D}”, as used herein, is intended to refer to the equilibrium dissociation constant of a particular antibody-antigen interaction. K_{D} is calculated by kₐ/k_{d}. In one embodiment, the antibodies of the invention have a K_{D} of about 2,000 nM or less, about 1,000 nM or less, about 500 nM or less, about 200 nM or less, about 100 nM or less, about 75 nM or less, about 25 nM or less, about 21 nM or less, about 12 nM or less, about 11 nM or less, about 10 nM or less, about 9 nM or less, about 8 nM or less, about 7 nM or less, about 6 nM or less, about 5 nM or less, about 4 nM or less, about 3 nM or less, about 2 nM or less, about 1 nM or less, about 0.5 nM or less, about 0.3 nM or less, about 0.1 nM or less, about 0.01 nM or less, or about 0.001 nM or less.

[0158] The phrase “contacting a cell with a modulator,” such as an antisense polynucleotide agent, as used herein, includes contacting a cell by any possible means. Contacting a cell with a moulator includes contacting a cell in vitro with the modulator or contacting a cell in vivo with the modulator. The contacting may be done directly or indirectly. Thus, for example, the modulator may be put into physical contact with the cell by the individual performing the method, or alternatively, the modulator may be put into a situation that will permit or cause it to subsequently come into contact with the cell.

[0159] Contacting a cell in vitro may be done, for example, by incubating the cell with the modulator. Contacting a cell in vivo may be done, for example, by injecting the modulator into or near the tissue where the cell is located, or by injecting the modulator into another area, e.g., the bloodstream or the subcutaneous space, such that the modulator will subsequently reach the tissue where the cell to be contacted is located. For example, the modulator, e.g., iRNA, may contain or be coupled to a ligand, e.g., GalNAc, that directs the iRNA to a site of interest, e.g., the liver. Combinations of in vitro and in vivo methods of contacting are also possible. For example, a cell may also be contacted in vitro with a modulator and subsequently transplanted into a subject.

[0160] In certain embodiments, contacting a cell with a modulator includes “introducing” or “delivering the modulator into the cell” by facilitating or effecting uptake or absorption into the cell. Absorption or uptake of an iRNA can occur through unaided diffusion or active cellular processes, or by auxiliary agents or devices. Introducing a modulator into a cell may be in vitro or in vivo. For example, for in vivo introduction, a modulator can be injected into a tissue site or administered systemically. In vitro introduction into a cell includes methods known in the art such as electroporation and lipofection. Further approaches are described herein below or are known in the art.

[0161] The term “lipid nanoparticle” or “LNP” is a vesicle comprising a lipid layer encapsulating a pharmaceutically active molecule, such as a nucleic acid molecule, e.g., an iRNA or a plasmid from which an iRNA is transcribed. LNPs are described in, for example, U.S. Pat. Nos. 6,858,225, 6,815,432, 8,158,601, and 8,058,069, the entire contents of which are hereby incorporated herein by reference.

[0162] As used herein, a “subject” is an animal, such as a mammal, including a primate (such as a human, a non-human primate, e.g., a monkey, and a chimpanzee), a non-primate (such as a cow, a pig, a horse, a goat, a rabbit, a sheep, a hamster, a guinea pig, a cat, a dog, a rat, or a mouse), or a bird that expresses the target gene, either endogenously or heterologously. In an embodiment, the subject is a human, such as a human being treated or assessed for a disease or disorder that would benefit from reduction in INHBE expression and/or activity; a human at risk for a disease or disorder that would benefit from reduction in INHBE expression and/or activity; a human having a disease or disorder that would benefit from reduction in INHBE expression and/or activity; or human being treated for a disease or disorder that would benefit from reduction in INHBE expression and/or activity as described herein. In some embodiments, the subject is a female human. In other embodiments, the subject is a male human. In one embodiment, the subject is an adult subject. In another embodiment, the subject is a pediatric subject.

[0163] As used herein, the terms “treating” or “treatment” refer to a beneficial or desired result, such as reducing at least one sign or symptom of an INHBE-associated disorder in a subject. Treatment also includes a reduction of one or more sign or symptoms associated with unwanted INHBE expression and/or activity; diminishing the extent of unwanted INHBE activation or stabilization; amelioration or palliation of unwanted INHBE activation or stabilization. “Treatment” can also mean prolonging survival as compared to expected survival in the absence of treatment.

[0164] The term “lower” in the context of the level of INHBE in a subject or a disease marker or symptom refers to a statistically significant decrease in such level. The decrease can be, for example, at least 10%, 15%, 20%, 25%, 30%, %, 40%, 45%, 50%, 55%, 60%, 65%, 70%, 75%, 80%, 85%, 90%, 95%, or more. In certain embodiments, a decrease is at least 20%. In certain embodiments, the decrease is at least 50% in a disease marker, e.g., protein or gene expression level. “Lower” in the context of the level of INHBE in a subject is a decrease to a level accepted as within the range of normal for an individual without such disorder. In certain embodiments, “lower” is the decrease in the difference between the level of a marker or symptom for a subject suffering from a disease and a level accepted within the range of normal for an individual. The term “lower” can also be used in association with normalizing a symptom of a disease or condition, i.e. decreasing the difference between a level in a subject suffering from an INHBE-associated disorder towards or to a level in a normal subject not suffering from an INHBE-associated disorder. As used herein, if a disease is associated with an elevated value for a symptom, “normal” is considered to be the upper limit of normal. If a disease is associated with a decreased value for a symptom, “normal” is considered to be the lower limit of normal.

[0165] As used herein, “prevention” or “preventing,” when used in reference to a disease, disorder or condition thereof, may be treated or ameliorated by a reduction in expression and/or activity of INHBE, refers to a reduction in the likelihood that a subject will develop a symptom associated with such a disease, disorder, or condition, e.g., a symptom of an INHBE-associated disorder, e.g., metabolic disorder, e.g., diabetes. The failure to develop a disease, disorder or condition, or the reduction in the development of a symptom associated with such a disease, disorder or condition (e.g., by at least about 10% on a clinically accepted scale for that disease or disorder), or the exhibition of delayed symptoms delayed (e.g., by days, weeks, months or years) is considered effective prevention.

[0166] As used herein, the term “inhibin subunit beta E-associated disorder” or “INHBE-associated disorder,” is a disease or disorder that is caused by, or associated with, INHBE gene expression or INHBE protein production and/or activity. The term “INHBE-associated disorder” includes a disease, disorder or condition that would benefit from a decrease in INHBE gene expression, replication, or protein activity. In some embodiments, the INHBE-associated disorder is a metabolic disorder, e.g., metabolic syndrome.

[0167] As used herein, a “metabolic disorder” refers to any disease or disorder that disrupts normal metabolism, the process of converting food to energy on a cellular level. Metabolic diseases affect the ability of the cell to perform critical biochemical reactions that involve the processing or transport of proteins (amino acids), carbohydrates (sugars and starches), or lipids (fatty acids). Non-limiting examples of metabolic diseases include disorders of carbohydrates, e.g., diabetes, type I diabetes, type II diabetes, galactosemia, hereditary fructose intolerance, fructose 1,6-diphosphatase deficiency, glycogen storage disorders, congenital disorders of glycosylation, insulin resistance, insulin insufficiency, hyperinsulinemia, impaired glucose tolerance (IGT), abnormal glycogen metabolism; disorders of amino acid metabolism, e.g., maple syrup urine disease (MSUD), or homocystinuria; disorder of organic acid metabolism, e.g., methylmalonic aciduria, 3-methylglutaconic aciduria-Barth syndrome, glutaric aciduria or 2-hydroxyglutaric aciduria—D and L forms; disorders of fatty acid beta-oxidation, e.g., medium-chain acyl-CoA dehydrogenase deficiency (MCAD), long-chain 3-hydroxyacyl-CoA dehydrogenase deficiency (LCHAD), very-long-chain acyl-CoA dehydrogenase deficiency (VLCAD); disorders of lipid metabolism, e.g., GM1 Gangliosidosis, Tay-Sachs Disease, Sandhoff Disease, Fabry Disease, Gaucher Disease, Niemann-Pick Disease, Krabbe Disease, Mucolipidoses, or Mucopolysaccharidoses; mitochondrial disorders, e.g., mitochondrial cardiomyopathies; Leigh disease; mitochondrial encephalopathy, lactic acidosis, and stroke-like episodes (MELAS); myoclonic epilepsy with ragged-red fibers (MERRF); neuropathy, ataxia, and retinitis pigmentosa (NARP); Barth syndrome; peroxisomal disorders, e.g., Zellweger Syndrome (cerebrohepatorenal syndrome), X-Linked Adrenoleukodystrophy or Refsum Disease.

[0168] In one embodiment, a metabolic disorder is metabolic syndrome. The term “metabolic syndrome, as used herein, is disorder that includes a clustering of components that reflect overnutrition, sedentary lifestyles, genetic factors, increasing age, and resultant excess adiposity. Metabolic syndrome includes the clustering of abdominal obesity, insulin resistance, dyslipidemia, and elevated blood pressure and is associated with other comorbidities including the prothrombotic state, proinflammatory state, nonalcoholic fatty liver disease, and reproductive disorders. The prevalence of the metabolic syndrome has increased to epidemic proportions not only in the United States and the remainder of the urbanized world but also in developing nations. Metabolic syndrome is associated with an approximate doubling of cardiovascular disease risk and a 5-fold increased risk for incident type 2 diabetes mellitus.

[0169] Abdominal adiposity (e.g., a large waist circumference (high waist-to-hip ratio)), high blood pressure, insulin resistance and dislipidemia are central to metabolic syndrome and its individual components (e.g., central obesity, fasting blood glucose (FBG)/pre-diabetes/diabetes, hypercholesterolemia, hypertriglyceridemia, and hypertension).

[0170] In one embodiment, a metabolic disorder is a disorder of carbohydrates. In one embodiment, the disorder of carbohydrates is diabetes.

[0171] As used herein, the term “diabetes” refers to a group of metabolic disorders characterized by high blood sugar (glucose) levels which result from defects in insulin secretion or action, or both. There are two most common types of diabetes, namely type 1 diabetes and type 2 diabetes, which both result from the body's inability to regulate insulin. Insulin is a hormone released by the pancreas in response to increased levels of blood sugar (glucose) in the blood.

[0172] The term “type I diabetes,” as used herein, refers to a chronic disease that occurs when the pancreas produces too little insulin to regulate blood sugar levels appropriately. Type I diabetes is also referred to as insulin-dependent diabetes mellitus, IDDM, and juvenile onset diabetes. People with type I diabetes (insulin-dependent diabetes) produce little or no insulin at all. Although about 6 percent of the United States population has some form of diabetes, only about 10 percent of all diabetics have type I disorder. Most people who have type I diabetes developed the disorder before age 30. Type 1 diabetes represents the result of a progressive autoimmune destruction of the pancreatic β-cells with subsequent insulin deficiency. More than 90 percent of the insulin-producing cells (beta cells) of the pancreas are permanently destroyed. The resulting insulin deficiency is severe, and to survive, a person with type I diabetes must regularly inject insulin.

[0173] In type II diabetes (also referred to as noninsulin-dependent diabetes mellitus, NDDM), the pancreas continues to manufacture insulin, sometimes even at higher than normal levels. However, the body develops resistance to its effects, resulting in a relative insulin deficiency. Type II diabetes may occur in children and adolescents but usually begins after age 30 and becomes progressively more common with age: about 15 percent of people over age 70 have type II diabetes. Obesity is a risk factor for type II diabetes, and 80 to 90 percent of the people with this disorder are obese.

[0174] In some embodiments, diabetes includes pre-diabetes. “Pre-diabetes” refers to one or more early diabetic conditions including impaired glucose utilization, abnormal or impaired fasting glucose levels, impaired glucose tolerance, impaired insulin sensitivity and insulin resistance. Prediabetes is a major risk factor for the development of type 2 diabetes mellitus, cardiovascular disease and mortality. Much focus has been given to developing therapeutic interventions that prevent the development of type 2 diabetes by effectively treating prediabetes.

[0175] Diabetes can be diagnosed by the administration of a glucose tolerance test. Clinically, diabetes is often divided into several basic categories. Primary examples of these categories include, autoimmune diabetes mellitus, non-insulin-dependent diabetes mellitus (type 1 NDDM), insulin-dependent diabetes mellitus (type 2 IDDM), non-autoimmune diabetes mellitus, non-insulin-dependent diabetes mellitus (type 2 NIDDM), and maturity-onset diabetes of the young (MODY). A further category, often referred to as secondary, refers to diabetes brought about by some identifiable condition which causes or allows a diabetic syndrome to develop. Examples of secondary categories include, diabetes caused by pancreatic disease, hormonal abnormalities, drug- or chemical-induced diabetes, diabetes caused by insulin receptor abnormalities, diabetes associated with genetic syndromes, and diabetes of other causes. (see e.g., Harrison's (1996) 14th ed., New York, McGraw-Hill).

[0176] In one embodiment, a metabolic disorder is a lipid metabolism disorder. As used herein, a “lipid metabolism disorder” or “disorder of lipid metabolism” refers to any disorder associated with or caused by a disturbance in lipid metabolism. This term also includes any disorder, disease or condition that can lead to hyperlipidemia, or condition characterized by abnormal elevation of levels of any or all lipids and/or lipoproteins in the blood. This term refers to an inherited disorder, such as familial hypertriglyceridemia, familial partial lipodystrophy type 1 (FPLD1), or an induced or acquired disorder, such as a disorder induced or acquired as a result of a disease, disorder or condition (e.g., renal failure), a diet, or intake of certain drugs (e.g., as a result of highly active antiretroviral therapy (HAART) used for treating, e.g., AIDS or HIV).

[0177] Additional examples of disorders of lipid metabolism include, but are not limited to, atherosclerosis, dyslipidemia, hypertriglyceridemia (including drug-induced hypertriglyceridemia, diuretic-induced hypertriglyceridemia, alcohol-induced hypertriglyceridemia, β-adrenergic blocking agent-induced hypertriglyceridemia, estrogen-induced hypertriglyceridemia, glucocorticoid-induced hypertriglyceridemia, retinoid-induced hypertriglyceridemia, cimetidine-induced hypertriglyceridemia, and familial hypertriglyceridemia), acute pancreatitis associated with hypertriglyceridemia, chylomicron syndrom, familial chylomicronemia, Apo-E deficiency or resistance, LPL deficiency or hypoactivity, hyperlipidemia (including familial combined hyperlipidemia), hypercholesterolemia, gout associated with hypercholesterolemia, xanthomatosis (subcutaneous cholesterol deposits), hyperlipidemia with heterogeneous LPL deficiency, hyperlipidemia with high LDL and heterogeneous LPL deficiency, fatty liver disease, or non-alcoholic stetohepatitis (NASH).

[0178] Cardiovascular diseases are also considered “metabolic disorders”, as defined herein. These diseases may include coronary artery disease (also called ischemic heart disease), hypertension, inflammation associated with coronary artery disease, restenosis, peripheral vascular diseases, and stroke.

[0179] Disorders related to body weight are also considered “metabolic disorders”, as defined herein. Such disorders may include obesity, hypo-metabolic states, hypothyroidism, uremia, and other conditions associated with weight gain (including rapid weight gain), weight loss, maintenance of weight loss, or risk of weight regain following weight loss.

[0180] Blood sugar disorders are further considered “metabolic disorders”, as defined herein. Such disorders may include diabetes, hypertension, and polycystic ovarian syndrome related to insulin resistance. Other exemplary disorders of metabolic disorders may also include renal transplantation, nephrotic syndrome, Cushing's syndrome, acromegaly, systemic lupus erythematosus, dysglobulinemia, lipodystrophy, glycogenosis type I, and Addison's disease.

[0181] In one embodiment, an INHBE-associated disorder is primary hypertension. “Primary hypertension” is a result of environmental or genetic causes (e.g., a result of no obvious underlying medical cause).

[0182] In one embodiment, an INHBE-associated disorder is secondary hypertension. “Secondary hypertension” has an identifiable underlying disorder which can be of multiple etiologies, including renal, vascular, and endocrine causes, e.g., renal parenchymal disease (e.g., polycystic kidneys, glomerular or interstitial disease), renal vascular disease (e.g., renal artery stenosis, fibromuscular dysplasia), endocrine disorders (e.g., adrenocorticosteroid or mineralocorticoid excess, pheochromocytoma, hyperthyroidism or hypothyroidism, growth hormone excess, hyperparathyroidism), coarctation of the aorta, or oral contraceptive use.

[0183] In one embodiment, an INHBE-associated disorder is resistant hypertension. “Resistant hypertension” is blood pressure that remains above goal (e.g., above 130 mm Hg systolic or above 90 diastolic) in spite of concurrent use of three antihypertensive agents of different classes, one of which is a thiazide diuretic. Subjects whose blood pressure is controlled with four or more medications are also considered to have resistant hypertension.

[0184] Additional diseases or conditions related to metabolic disorders that would be apparent to the skilled artisan and are within the scope of this disclosure.

[0185] “Therapeutically effective amount,” as used herein, is intended to include the amount of a modulator that, when administered to a subject having an INHBE-associated disorder, is sufficient to effect treatment of the disease (e.g., by diminishing, ameliorating, or maintaining the existing disease or one or more symptoms of disease). The “therapeutically effective amount” may vary depending on the modulator, how the agent is administered, the disease and its severity and the history, age, weight, family history, genetic makeup, the types of preceding or concomitant treatments, if any, and other individual characteristics of the subject to be treated.

[0186] “Prophylactically effective amount,” as used herein, is intended to include the amount of a modulator that, when administered to a subject having an INHBE-associated disorder, is sufficient to prevent or ameliorate the disease or one or more symptoms of the disease. Ameliorating the disease includes slowing the course of the disease or reducing the severity of later-developing disease. The “prophylactically effective amount” may vary depending on the modulator, how the modulator is administered, the degree of risk of disease, and the history, age, weight, family history, genetic makeup, the types of preceding or concomitant treatments, if any, and other individual characteristics of the patient to be treated.

[0187] A “therapeutically-effective amount” or “prophylactically effective amount” also includes an amount of a modulator that produces some desired effect at a reasonable benefit/risk ratio applicable to any treatment. The modulator employed in the methods of the present invention may be administered in a sufficient amount to produce a reasonable benefit/risk ratio applicable to such treatment.

[0188] The phrase “pharmaceutically acceptable” is employed herein to refer to those compounds, materials, compositions, or dosage forms which are, within the scope of sound medical judgment, suitable for use in contact with the tissues of human subjects and animal subjects without excessive toxicity, irritation, allergic response, or other problem or complication, commensurate with a reasonable benefit/risk ratio.

[0189] The phrase “pharmaceutically-acceptable carrier” as used herein means a pharmaceutically-acceptable material, composition, or vehicle, such as a liquid or solid filler, diluent, excipient, manufacturing aid (e.g., lubricant, talc magnesium, calcium or zinc stearate, or steric acid), or solvent encapsulating material, involved in carrying or transporting the subject compound from one organ, or portion of the body, to another organ, or portion of the body. Each carrier must be “acceptable” in the sense of being compatible with the other ingredients of the formulation and not injurious to the subject being treated. Such carriers are known in the art. Pharmaceutically acceptable carriers include carriers for administration by injection.

[0190] The term “sample,” as used herein, includes a collection of similar fluids, cells, or tissues isolated from a subject, as well as fluids, cells, or tissues present within a subject. Examples of biological fluids include blood, serum and serosal fluids, plasma, cerebrospinal fluid, ocular fluids, lymph, urine, saliva, and the like. Tissue samples may include samples from tissues, organs, or localized regions. For example, samples may be derived from particular organs, parts of organs, or fluids or cells within those organs. In certain embodiments, samples may be derived from the liver (e.g., whole liver or certain segments of liver or certain types of cells in the liver, such as, e.g., hepatocytes). In some embodiments, a “sample derived from a subject” refers to urine obtained from the subject. A “sample derived from a subject” can refer to blood or blood derived serum or plasma from the subject.

### II. Modulators of the Invention

[0191] The present invention provides modulators, i.e., inhibitors, of INHBE and compostions comprising such modulators for use in modulating the expression and/or activity of INHBE. In some embodiments, the modulators and compositions of the invention are for use in treating a subject, e.g., a mammal, such as a human susceptible to developing an INHBE-associated disorder, e.g., metabolic disorder, e.g., metabolic syndrome, a disorder of carbohydrates, e.g., type II diabetes, pre-diabetes, a lipid metabolism disorder, e.g., a hyperlipidemia, hypertension, a cardiovascular disease, a disorders of body weight.

[0192] In one aspect, the present invention provides a modulator of inhibin subunit beta E (INHBE). The modulator may be an oligonucleotide that targets INHBE, such as a double stranded ribonucleic acid (dsRNA) or an antisense polynucleotide agent; an antibody, or antigen-binding fragment thereof, that specifically binds INHBE, such as a monoclonal anti-INHBE antibody, or antigen-binding fragment thereof; a small molecule; a guideRNA that effects ADAR editing, such as a guideRNA that includes a stem loop structure that binds the ADAR enzyme; or a guideRNA that effects CRISPR editing.

[0193] In one embodiment, the modulator of the invention is an RNAi, e.g., double stranded ribonucleic acid (dsRNA) agent, targeting an INHBE gene.

[0194] In one embodiment, the modulator of the invention is an antisense polynucleotide agent targeting an INHBE gene.

[0195] In one embodiment, the modulator of the invention is an antibody, or antigen-binding fragment thereof, that specifically binds INHBE, e.g., a human, humanized or chimeric anti-INHBE antibody, or antigen-binding fragment thereof.

[0196] In some embodiments, the modulator of INHBE is a small molecule.

[0197] In some embodiments, the modulator of INHBE is an aptamer. In some embodiments, the aptamer is an oligonucleotide aptamer. In some embodiments, the aptamer is a peptide aptamer.

[0198] In some embodiments, the modulator of INHBE is a guideRNA that effects double-stranded RNA-specific adenosine deaminase (ADAR) editing, such as a guideRNA that includes a stem loop structure that binds the ADAR enzyme.

[0199] In some embodiment, the modulator of INHBE is a guideRNA that effects CRIPR editing.

### A. Oligonucleotides of the Invention that Target INHBE

### i. iRNAs of the Invention

[0200] In one embodiment, the oligonucleotide modulator of the invention that targets INHBE is an RNAi.

[0201] Accordingly, the present invention provides iRNA compositions which effect the RNA-induced silencing complex (RISC)-mediated cleavage of RNA transcripts of a inhibin subunit beta E (INHBE) gene. The gene may be within a cell, e.g., a cell within a subject, such as a human. The use of these iRNAs enables the targeted degradation of mRNAs of the corresponding gene (INHBE) in mammals.

[0202] The iRNAs of the invention have been designed to target the human inhibin subunit beta E (INHBE) gene, including portions of the gene that are conserved in the INHBE orthologs of other mammalian species. Without intending to be limited by theory, it is believed that a combination or sub-combination of the foregoing properties and the specific target sites or the specific modifications in these iRNAs confer to the iRNAs of the invention improved efficacy, stability, potency, durability, and safety.

[0203] Accordingly, the present invention provides methods for treating and preventing an inhibin subunit beta E (INHBE)-associated disorder, e.g., a metabolic disorder, e.g. metabolic syndrome, a disorder of carbohydrates, e.g., type II diabetes, pre-diabetes, a lipid metabolism disorder, e.g., a hyperlipidemia, hypertension, a cardiovascular disease, a disorders of body weight, using iRNA compositions which effect the RNA-induced silencing complex (RISC)-mediated cleavage of RNA transcripts of an INHBE gene.

[0204] The iRNAs of the invention include an RNA strand (the antisense strand) having a region which is up to about 30 nucleotides or less in length, e.g., 19-30, 19-29, 19-28, 19-27, 19-26, 19-25, 19-24, 19-23, 19-22, 19-21, 19-20, 20-30, 20-29, 20-28, 20-27, 20-26, 20-25, 20-24, 20-23, 20-22, 20-21, 21-30, 21-29, 21-28, 21-27, 21-26, 21-25, 21-24, 21-23, or 21-22 nucleotides in length, which region is substantially complementary to at least part of an mRNA transcript of an INHBE gene.

[0205] In certain embodiments, one or both of the strands of the double stranded RNAi agents of the invention is up to 66 nucleotides in length, e.g., 36-66, 26-36, 25-36, 31-60, 22-43, 27-53 nucleotides in length, with a region of at least 19 contiguous nucleotides that is substantially complementary to at least a part of an mRNA transcript of an INHBE gene. In some embodiments, such iRNA agents having longer length antisense strands may, for example, include a second RNA strand (the sense strand) of 20-60 nucleotides in length wherein the sense and antisense strands form a duplex of 18-30 contiguous nucleotides.

[0206] The use of iRNAs of the invention enables the targeted degradation of mRNAs of the corresponding gene (INHBE gene) in mammals. Using in vitro assays, the present inventors have demonstrated that iRNAs targeting an INHBE gene can potently mediate RNAi, resulting in significant inhibition of expression of an INHBE gene. Thus, methods and compositions including these iRNAs are useful for treating a subject having an INHBE-associated disorder, e.g., a metabolic disorder, e.g. metabolic syndrome, a disorder of carbohydrates, e.g., type II diabetes, pre-diabetes, a lipid metabolism disorder, e.g., a hyperlipidemia, hypertension, a cardiovascular disease, a disorders of body weight.

[0207] Accordingly, the present invention provides methods and combination therapies for treating a subject having a disorder that would benefit from inhibiting or reducing the expression of an INHBE gene, e.g., a inhibin subunit beta E (INHBE)-associated disease, such as metabolic disorder, e.g., metabolic syndrome, a disorder of carbohydrates, e.g., type II diabetes, pre-diabetes, a lipid metabolism disorder, e.g., a hyperlipidemia, hypertension, a cardiovascular disease, a disorders of body weight, using iRNA compositions which effect the RNA-induced silencing complex (RISC)-mediated cleavage of RNA transcripts of an INHBE gene.

[0208] The present invention also provides methods for preventing at least one symptom in a subject having a disorder that would benefit from inhibiting or reducing the expression of an INHBE gene, e.g., a metabolic disorder, e.g. metabolic syndrome, a disorder of carbohydrates, e.g., type II diabetes, pre-diabetes, a lipid metabolism disorder, e.g., a hyperlipidemia, hypertension, a cardiovascular disease, a disorder of body weight.

[0209] In one aspect, the present invention provides iRNAs which inhibit the expression of an INHBE gene. In certain embodiments, the iRNA includes double stranded ribonucleic acid (dsRNA) molecules for inhibiting the expression of an INHBE gene in a cell, such as a cell within a subject, e.g., a mammal, such as a human susceptible to developing an INHBE-associated disorder, e.g., metabolic disorder, e.g., metabolic syndrome, a disorder of carbohydrates, e.g., type II diabetes, pre-diabetes, a lipid metabolism disorder, e.g., a hyperlipidemia, hypertension, a cardiovascular disease, a disorders of body weight. The dsRNAi agent includes an antisense strand having a region of complementarity which is complementary to at least a part of an mRNA formed in the expression of an INHBE gene. The region of complementarity is about 19-30 nucleotides in length (e.g., about 30, 29, 28, 27, 26, 25, 24, 23, 22, 21, 20, or 19 nucleotides in length).

[0210] Upon contact with a cell expressing the INHBE gene, the iRNA inhibits the expression of the INHBE gene (e.g., a human, a primate, a non-primate, or a rat INHBE gene) by at least about 50% as assayed by, for example, a PCR or branched DNA (bDNA)-based method, or by a protein-based method, such as by immunofluorescence analysis, using, for example, western blotting or flow cytometric techniques. In certain embodiments, inhibition of expression is determined by the qPCR method provided in the examples herein with the siRNA at, e.g., a 10 nM concentration, in an appropriate organism cell line provided therein. In certain embodiments, inhibition of expression in vivo is determined by knockdown of the human gene in a rodent expressing the human gene, e.g., a mouse or an AAV-infected mouse expressing the human target gene, e.g., when administered as single dose, e.g., at 3 mg/kg at the nadir of RNA expression.

[0211] A dsRNA includes two RNA strands that are complementary and hybridize to form a duplex structure under conditions in which the dsRNA will be used. One strand of a dsRNA (the antisense strand) includes a region of complementarity that is substantially complementary, and generally fully complementary, to a target sequence. The target sequence can be derived from the sequence of an mRNA formed during the expression of an INHBE gene. The other strand (the sense strand) includes a region that is complementary to the antisense strand, such that the two strands hybridize and form a duplex structure when combined under suitable conditions. As described elsewhere herein and as known in the art, the complementary sequences of a dsRNA can also be contained as self-complementary regions of a single nucleic acid molecule, as opposed to being on separate oligonucleotides.

[0212] Generally, the duplex structure is 15 to 30 base pairs in length, e.g., 15-29, 15-28, 15-27, 15-26, 15-25, 15-24, 15-23, 15-22, 15-21, 15-20, 15-19, 15-18, 15-17, 18-30, 18-29, 18-28, 18-27, 18-26, 18-25, 18-24, 18-23, 18-22, 18-21, 18-20, 19-30, 19-29, 19-28, 19-27, 19-26, 19-25, 19-24, 19-23, 19-22, 19-21, 19-20, 20-30, 20-29, 20-28, 20-27, 20-26, 20-25, 20-24, 20-23, 20-22, 20-21, 21-30, 21-29, 21-28, 21-27, 21-26, 21-25, 21-24, 21-23, or 21-22 base pairs in length. In certain embodiments, the duplex structure is 18 to 25 base pairs in length, e.g., 18-25, 18-24, 18-23, 18-22, 18-21, 18-20, 19-25, 19-24, 19-23, 19-22, 19-21, 19-20, 20-25, 20-24, 20-23, 20-22, 20-21, 21-25, 21-24, 21-23, 21-22, 22-25, 22-24, 22-23, 23-25, 23-24 or 24-25 base pairs in length, for example, 19-21 basepairs in length. Ranges and lengths intermediate to the above recited ranges and lengths are also contemplated to be part of the disclosure.

[0213] Similarly, the region of complementarity to the target sequence is 15 to 30 nucleotides in length, e.g., 15-29, 15-28, 15-27, 15-26, 15-25, 15-24, 15-23, 15-22, 15-21, 15-20, 15-19, 15-18, 15-17, 18-30, 18-29, 18-28, 18-27, 18-26, 18-25, 18-24, 18-23, 18-22, 18-21, 18-20, 19-30, 19-29, 19-28, 19-27, 19-26, 19-25, 19-24, 19-23, 19-22, 19-21, 19-20, 20-30, 20-29, 20-28, 20-27, 20-26, 20-25, 20-24, 20-23, 20-22, 20-21, 21-30, 21-29, 21-28, 21-27, 21-26, 21-25, 21-24, 21-23, or 21-22 nucleotides in length, for example 19-23 nucleotides in length or 21-23 nucleotides in length. Ranges and lengths intermediate to the above recited ranges and lengths are also contemplated to be part of the disclosure.

[0214] In some embodiments, the duplex structure is 19 to 30 base pairs in length. Similarly, the region of complementarity to the target sequence is 19 to 30 nucleotides in length.

[0215] In some embodiments, the dsRNA is about 19 to about 23 nucleotides in length, or about 25 to about 30 nucleotides in length. In general, the dsRNA is long enough to serve as a substrate for the Dicer enzyme. For example, it is well-known in the art that dsRNAs longer than about 21-23 nucleotides in length may serve as substrates for Dicer. As the ordinarily skilled person will also recognize, the region of an RNA targeted for cleavage will most often be part of a larger RNA molecule, often an mRNA molecule. Where relevant, a “part” of an mRNA target is a contiguous sequence of an mRNA target of sufficient length to allow it to be a substrate for RNAi-directed cleavage (i.e., cleavage through a RISC pathway).

[0216] One of skill in the art will also recognize that the duplex region is a primary functional portion of a dsRNA, e.g., a duplex region of about 19 to about 30 base pairs, e.g., about 19-30, 19-29, 19-28, 19-27, 19-26, 19-25, 19-24, 19-23, 19-22, 19-21, 19-20, 20-30, 20-29, 20-28, 20-27, 20-26, 20-25, 20-24, 20-23, 20-22, 20-21, 21-30, 21-29, 21-28, 21-27, 21-26, 21-25, 21-24, 21-23, or 21-22 base pairs. Thus, in one embodiment, to the extent that it becomes processed to a functional duplex, of e.g., 15-30 base pairs, that targets a desired RNA for cleavage, an RNA molecule or complex of RNA molecules having a duplex region greater than 30 base pairs is a dsRNA. Thus, an ordinarily skilled artisan will recognize that in one embodiment, a miRNA is a dsRNA. In another embodiment, a dsRNA is not a naturally occurring miRNA. In another embodiment, an iRNA agent useful to target INHBE gene expression is not generated in the target cell by cleavage of a larger dsRNA.

[0217] A dsRNA as described herein can further include one or more single-stranded nucleotide overhangs, e.g., 1-4, 2-4, 1-3, 2-3, 1, 2, 3, or 4 nucleotides. dsRNAs having at least one nucleotide overhang can have superior inhibitory properties relative to their blunt-ended counterparts. A nucleotide overhang can comprise or consist of a nucleotide/nucleoside analog, including a deoxynucleotide/nucleoside. The overhang(s) can be on the sense strand, the antisense strand, or any combination thereof. Furthermore, the nucleotide(s) of an overhang can be present on the 5′-end, 3′-end, or both ends of an antisense or sense strand of a dsRNA.

[0218] A dsRNA can be synthesized by standard methods known in the art. Double stranded RNAi compounds of the invention may be prepared using a two-step procedure. First, the individual strands of the double stranded RNA molecule are prepared separately. Then, the component strands are annealed. The individual strands of the siRNA compound can be prepared using solution-phase or solid-phase organic synthesis or both. Organic synthesis offers the advantage that the oligonucleotide strands comprising unnatural or modified nucleotides can be easily prepared. Similarly, single-stranded oligonucleotides of the invention can be prepared using solution-phase or solid-phase organic synthesis or both.

[0219] In an aspect, a dsRNA of the invention includes at least two nucleotide sequences, a sense sequence and an anti-sense sequence. The sense strand is selected from the group of sequences provided in any one of Tables 2-3, and the corresponding antisense strand of the sense strand is selected from the group of sequences of any one of Tables 2-3. In this aspect, one of the two sequences is complementary to the other of the two sequences, with one of the sequences being substantially complementary to a sequence of an mRNA generated in the expression of an INHBE gene. As such, in this aspect, a dsRNA will include two oligonucleotides, where one oligonucleotide is described as the sense strand in any one of Tables 2-3, and the second oligonucleotide is described as the corresponding antisense strand of the sense strand in any one of Tables 2-3.

[0220] In certain embodiments, the substantially complementary sequences of the dsRNA are contained on separate oligonucleotides. In other embodiments, the substantially complementary sequences of the dsRNA are contained on a single oligonucleotide.

[0221] It will be understood that, although the sequences in, for example, Table 3, are not described as modified or conjugated sequences, the RNA of the iRNA of the invention e.g., a dsRNA of the invention, may comprise any one of the sequences set forth in any one of Tables 2-3 that is un-modified, un-conjugated, or modified or conjugated differently than described therein. In other words, the invention encompasses dsRNA of Tables 2-3 which are un-modified, un-conjugated, modified, or conjugated, as described herein.

[0222] The skilled person is well aware that dsRNAs having a duplex structure of about 20 to 23 base pairs, e.g., 21, base pairs have been hailed as particularly effective in inducing RNA interference (Elbashir et al., EMBO 2001, 20:6877-6888). However, others have found that shorter or longer RNA duplex structures can also be effective (Chu and Rana (2007) RNA 14:1714-1719; Kim et al. (2005) Nat Biotech 23:222-226). In the embodiments described above, by virtue of the nature of the oligonucleotide sequences provided in any one of Tables 2-3. dsRNAs described herein can include at least one strand of a length of minimally 21 nucleotides. It can be reasonably expected that shorter duplexes having any one of the sequences in any one of Tables 2-3 minus only a few nucleotides on one or both ends can be similarly effective as compared to the dsRNAs described above. Hence, dsRNAs having a sequence of at least 19, 20, or more contiguous nucleotides derived from any one of the sequences of any one of Tables 2-3, and differing in their ability to inhibit the expression of an INHBE gene by not more than about 5, 10, 15, 20, 25, or 30% inhibition from a dsRNA comprising the full sequence, are contemplated to be within the scope of the present invention.

[0223] In addition, the RNAs provided in Tables 2-3 identify a site(s) in an INHBE transcript that is susceptible to RISC-mediated cleavage. As such, the present invention further features iRNAs that target within one of these sites. As used herein, an iRNA is said to target within a particular site of an RNA transcript if the iRNA promotes cleavage of the transcript anywhere within that particular site. Such an iRNA will generally include at least about 19 contiguous nucleotides from any one of the sequences provided in any one of Tables 2-3 coupled to additional nucleotide sequences taken from the region contiguous to the selected sequence in an INHBE gene.

### ii. Antisense Polynucleotide Agents of the Invention

[0224] In one embodiment, the modulator of the invention is an antisense polynucleotide agent.

[0225] Accordingly, the present invention provides polynucleotide agents, e.g., antisense polynucleotide agents, and compositions comprising such agents, which target an INHBE gene and inhibit the expression of the INHBE gene. In one embodiment, the polynucleotide agents, e.g., antisense polynucleotide agents, inhibit the expression of an INHBE gene in a cell, such as a cell within a subject, e.g., a mammal, such as a human having an INHBE-associated disease, e.g., acromegaly, gigantism, or cancer.

[0226] The polynucleotide agents of the invention, e.g., antisense polynucleotide agents, include a region of complementarity which is complementary to at least a part of an mRNA formed in the expression of an INHBE gene. The region of complementarity may be about 50 nucleotides or less in length (e.g., 22-12, 20-14, 50, 49, 48, 47, 46, 45, 44, 43, 42, 41, 40, 39, 38, 37, 36, 35, 34, 33, 32, 31, 30, 29, 28, 27, 26, 25, 24, 23, 22, 21, 20, 19, 18, 17, 16, 15, 14, 13, 12, 11, or 10 nucleotides or less in length). Upon contact with a cell expressing the INHBE gene, the antisense polynucleotide agent inhibits the expression of the INHBE gene (e.g., a human, a primate, a non-primate, or a bird INHBE gene) by at least 20% as assayed by, for example, a PCR or branched DNA (bDNA)-based method, or by a protein-based method, such as by immunofluorescence analysis, using, for example, western blotting, or flow cytometric techniques. In preferred embodiments, the inhibition of expression is determined at a 10 nM concetration using the cell line, delivery method.

[0227] The region of complementarity between an antisense polynucleotide agent and a target sequence may be substantially complementary (e.g., there is a sufficient degree of complementarity between the antisense polynucleotide agent and a target nucleic acid to so that they specifically hybridize and induce a desired effect), but is generally fully complementary to the target sequence. The target sequence can be derived from the sequence of an mRNA formed during the expression of an INHBE gene.

[0228] Accordingly, in one aspect, an antisense polynucleotide agent of the invention specifically hybridizes to a target nucleic acid molecule, such as the mRNA encoding INHBE, and comprises a contiguous nucleotide sequence which corresponds to the reverse complement of a nucleotide sequence of any one of SEQ ID NOs:1, 3, 5, 7, or 9, or a fragment of any one of SEQ ID NOs:1, 3, 5, 7, or 9.

[0229] In some embodiments, the antisense polynucleotide agents of the invention may be substantially complementary to the target sequence. For example, an antisense polynucleotide agent that is substantially complementary to the target sequence may include a contiguous nucleotide sequence comprising no more than 5 mismatches (e.g., no more than 1, no more than 2, no more than 3, no more than 4, or no more than 5 mismatches) when hybridizing to a target sequence, such as to the corresponding region of a nucleic acid which encodes a mammalian INHBE mRNA. In some embodiments, the contiguous nucleotide sequence comprises no more than a single mismatch when hybridizing to the target sequence, such as the corresponding region of a nucleic acid which encodes a mammalian INHBE mRNA.

[0230] In some embodiments, the antisense polynucleotide agents of the invention that are substantially complementary to the target sequence comprise a contiguous nucleotide sequence which is at least 80% complementary over its entire length to the equivalent region of the nucleotide sequence of any one of SEQ ID NOs:1, 3, 5, 7, or 9, or a fragment of any one of SEQ ID NOs:1, 3, 5, 7, or 9, such as at least 85%, 90%, 95%, or 100% complementary.

[0231] In some embodiments, an antisense polynucleotide agent comprises a contiguous nucleotide sequence which is fully complementary over its entire length to the equivalent region of the nucleotide sequence of any one of SEQ ID NOs: 1, 3, 5, 7, or 9 (or a fragment of any one of SEQ ID NOs:1-5). For example, the nucleotide sequence of an antisense polynucleotide agent is fully complementary over its entire length to the equivalent region of nucleotides 1-20 of GenBank Accession No. NM_031479.5 (SEQ ID NO:1) (see, e.g., Table 4 or 5).

[0232] An antisense polynucleotide agent may comprise a contiguous nucleotide sequence of about 4 to 50 nucleotides in length, or any subrange falling within that range, e.g., about 8-49, 8-48, 8-47, 8-46, 8-45, 8-44, 8-43, 8-42, 8-41, 8-40, 8-39, 8-38, 8-37, 8-36, 8-35, 8-34, 8-33, 8-32, 8-31, 8-30, 8-29, 8-28, 8-27, 8-26, 8-25, 8-24, 8-23, 8-22, 8-21, 8-20, 8-19, 8-18, 8-17, 8-16, 8-15, 8-14, 8-13, 8-12, 8-11, 8-10, 8-9, 10-49, 10-48, 10-47, 10-46, 10-45, 10-44, 10-43, 10-42, 10-41, 10-40, 10-39, 10-38, 10-37, 10-36, 10-35, 10-34, 10-33, 10-32, 10-31, 10-30, 10-29, 10-28, 10-27, 10-26, 10-25, 10-24, 10-23, 10-22, 10-21, 10-20, 10-19, 10-18, 10-17, 10-16, 10-15, 10-14, 10-13, 10-12, 10-11, 11-49, 11-48, 11-47, 11-46, 11-45, 11-44, 11-43, 11-42, 11-41, 11-40, 11-39, 11-38, 11-37, 11-36, 11-35, 11-34, 11-33, 11-32, 11-31, 11-30, 11-29, 11-28, 11-27, 11-26, 11-25, 11-24, 11-23, 11-22, 11-21, 11-20, 11-19, 11-18, 11-17, 11-16, 11-15, 11-14, 11-13, 11-12, 12-49, 12-48, 12-47, 12-46, 12-45, 12-44, 12-43, 12-42, 12-41, 12-40, 12-39, 12-38, 12-37, 12-36, 12-35, 12-34, 12-33, 12-32, 12-31, 12-30, 12-29, 12-28, 12-27, 12-26, 12-25, 12-24, 12-23, 12-22, 12-21, 12-20, 12-19, 12-18, 12-17, 12-16, 12-15, 12-14, 12-13, 13-49, 13-48, 13-47, 13-46, 13-45, 13-44, 13-43, 13-42, 13-41, 13-40, 13-39, 13-38, 13-37, 13-36, 13-35, 13-34, 13-33, 13-32, 13-31, 13-30, 13-29, 13-28, 13-27, 13-26, 13-25, 13-24, 13-23, 13-22, 13-21, 13-20, 13-19, 13-18, 13-17, 13-16, 13-15, 13-14, 14-49, 14-48, 14-47, 14-46, 14-45, 14-44, 14-43, 14-42, 14-41, 14-40, 14-39, 14-38, 14-37, 14-36, 14-35, 14-34, 14-33, 14-32, 14-31, 14-30, 14-29, 14-28, 14-27, 14-26, 14-25, 14-24, 14-23, 14-22, 14-21, 14-20, 14-19, 14-18, 14-17, 14-16, 14-15, 15-49, 15-48, 15-47, 15-46, 15-45, 15-44, 15-43, 15-42, 15-41, 15-40, 15-39, 15-38, 15-37, 15-36, 15-35, 15-34, 15-33, 15-32, 15-31, 15-30, 15-29, 15-28, 15-27, 15-26, 15-25, 15-24, 15-23, 15-22, 15-21, 15-20, 15-19, 15-18, 15-17, 15-16, 16-49, 16-48, 16-47, 16-46, 16-45, 16-44, 16-43, 16-42, 16-41, 16-40, 16-39, 16-38, 16-37, 16-36, 16-35, 16-34, 16-33, 16-32, 16-31, 16-30, 16-29, 16-28, 16-27, 16-26, 16-25, 16-24, 16-23, 16-22, 16-21, 16-20, 16-19, 16-18, 16-17, 17-49, 17-48, 17-47, 17-46, 17-45, 17-44, 17-43, 17-42, 17-41, 17-40, 17-39, 17-38, 17-37, 17-36, 17-35, 17-34, 17-33, 17-32, 17-31, 17-30, 17-29, 17-28, 17-27, 17-26, 17-25, 17-24, 17-23, 17-22, 17-21, 17-20, 17-19, 17-18, 18-49, 18-48, 18-47, 18-46, 18-45, 18-44, 18-43, 18-42, 18-41, 18-40, 18-39, 18-38, 18-37, 18-36, 18-35, 18-34, 18-33, 18-32, 18-31, 18-30, 18-29, 18-28, 18-27, 18-26, 18-25, 18-24, 18-23, 18-22, 18-21, 18-20, 19-49, 19-48, 19-47, 19-46, 19-45, 19-44, 19-43, 19-42, 19-41, 19-40, 19-39, 19-38, 19-37, 19-36, 19-35, 19-34, 19-33, 19-32, 19-31, 19-30, 19-29, 19-28, 19-27, 19-26, 19-25, 19-24, 19-23, 19-22, 19-21, 19-20, 20-49, 20-48, 20-47, 20-46, 20-45, 20-44, 20-43, 20-42, 20-41, 20-40, 20-39, 20-38, 20-37, 20-36, 20-35, 20-34, 20-33, 20-32, 20-31, 20-30, 20-29, 20-28, 20-27, 20-26, 20-25, 20-24, 20-23, 20-22, 20-21, 21-49, 21-48, 21-47, 21-46, 21-45, 21-44, 21-43, 21-42, 21-41, 21-40, 21-39, 21-38, 21-37, 21-36, 21-35, 21-34, 21-33, 21-32, 21-31, 21-30, 21-29, 21-28, 21-27, 21-26, 21-25, 21-24, 21-23, 21-22, 22-49, 22-48, 22-47, 22-46, 22-45, 22-44, 22-43, 22-42, 22-41, 22-40, 22-39, 22-38, 22-37, 22-36, 22-35, 22-34, 22-33, 22-32, 22-31, 22-30, 22-29, 22-28, 22-27, 22-26, 22-25, 22-24, 22-23, 23-49, 23-48, 23-47, 23-46, 23-45, 23-44, 23-43, 23-42, 23-41, 23-40, 23-39, 23-38, 23-37, 23-36, 23-35, 23-34, 23-33, 23-32, 23-31, 23-30, 23-29, 23-28, 23-27, 23-26, 23-25, 23-24, 24-49, 24-48, 24-47, 24-46, 24-45, 24-44, 24-43, 24-42, 24-41, 24-40, 24-39, 24-38, 24-37, 24-36, 24-35, 24-34, 24-33, 24-32, 24-31, 24-30, 24-29, 24-28, 24-27, 24-26, 24-25, 25-49, 25-48, 25-47, 25-46, 25-45, 25-44, 25-43, 25-42, 25-41, 25-40, 25-39, 25-38, 25-37, 25-36, 25-35, 25-34, 25-33, 25-32, 25-31, 25-30, 25-29, 25-28, 25-27, 25-26, 26-49, 26-48, 26-47, 26-46, 26-45, 26-44, 26-43, 26-42, 26-41, 26-40, 26-39, 26-38, 26-37, 26-36, 26-35, 26-34, 26-33, 26-32, 26-31, 26-30, 26-29, 26-28, 26-27, 27-49, 27-48, 27-47, 27-46, 27-45, 27-44, 27-43, 27-42, 27-41, 27-40, 27-39, 27-38, 27-37, 27-36, 27-35, 27-34, 27-33, 27-32, 27-31, 27-30, 27-29, 27-28, 28-49, 28-48, 28-47, 28-46, 28-45, 28-44, 28-43, 28-42, 28-41, 28-40, 28-39, 28-38, 28-37, 28-36, 28-35, 28-34, 28-33, 28-32, 28-31, 28-30, 28-29, 29-49, 29-48, 29-47, 29-46, 29-45, 29-44, 29-43, 29-42, 29-41, 29-40, 29-39, 29-38, 29-37, 29-36, 29-35, 29-34, 29-33, 29-32, 29-31, 29-30, 30-49, 30-48, 30-47, 30-46, 30-45, 30-44, 30-43, 30-42, 30-41, 30-40, 30-39, 30-38, 30-37, 30-36, 30-35, 30-34, 30-33, 30-32, or 30-31 nucleotides in length, e.g., 4, 5, 6, 7, 8, 9, 10, 11, 12, 13, 14, 15, 16, 17, 18, 19, 20, 21, 22, 23, 24, 25, 26, 27, 28, 29, 30, 31, 32, 33, 34, 35, 36, 37, 38, 39, 40, 41, 42, 43, 44, 45, 46, 47, 48, 49, or 50 nucleotides in length.

[0233] In some embodiments, an antisense polynucleotide agent may comprise a contiguous nucleotide sequence of no more than 22 nucleotides, e.g., no more than any of 21 nucleotides, 20 nucleotides, 19 nucleotides, no more than 18 nucleotides, 17 nucleotides, 16 nucleotides, than 15 nucleotides, or 14 nucleotides. In other embodiments, the antisense polynucleotide agents of the invention are 20 nucleotides in length. In other embodiments, the antisense polynucleotide agents of the invention are 14 nucleotides in length. In certain embodiments, the polynucleotide is at least 12 nucleotides in length.

[0234] In one aspect, an antisense polynucleotide agent of the invention includes a sequence selected from sequences provided in Table 4 or Table 5. It will be understood that, although the sequences in Table 5 are described as modified or conjugated sequences, an antisense polynucleotide agent of the invention, may also comprise any one of the sequences set forth in Table 5 that is un-modified, un-conjugated, or modified or conjugated differently than described therein.

[0235] By virtue of the nature of the nucleotide sequences provided in Table 4 or 5, antisense polynucleotide agents of the invention may include one of the sequences of Table 3 or 5 minus only a few nucleotides on one or both ends and yet remain similarly effective as compared to the antisense polynucleotide agents described above. Hence, antisense polynucleotide agents having a sequence of at least 4, 5, 6, 7, 8, 9, 10, 11, 12, 13, 14, 15, 16, 17, 18, 19, or 20 contiguous nucleotides derived from one of the sequences of Table 4 or 5 and differing in their ability to inhibit the expression of an INHBE gene by not more than 5, 10, 15, 20, 25, or 30% inhibition from an antisense polynucleotide agent comprising the full sequence, are contemplated to be within the scope of the present invention. In addition, the antisense polynucleotide agents provided in Table 4 and 5 identify a region(s) in an INHBE transcript that is susceptible to antisense inhibition (e.g., the regions encompassed by the start and end positions relative to the in nucleotide sequences in Table 4). As such, the present invention further features antisense polynucleotide agents that target within one of these sites.

[0236] As used herein, an antisense polynucleotide agent is said to target within a particular site of an RNA transcript if the antisense polynucleotide agent promotes antisense inhibition of the target at that site. Such an antisense polynucleotide agent will generally include at least 14 contiguous nucleotides from one of the sequences provided in Table 4 or 5 coupled to additional nucleotide sequences taken from the region contiguous to the selected sequence in an INHBE gene.

[0237] While a target sequence is generally 4-50 nucleotides in length, there is wide variation in the suitability of particular sequences in this range for directing antisense inhibition of any given target RNA. Various software packages and the guidelines set out herein provide guidance for the identification of optimal target sequences for any given gene target, but an empirical approach can also be taken in which a “window” or “mask” of a given size (as a non-limiting example, 20 nucleotides) is literally or figuratively (including, e.g., in silico) placed on the target RNA sequence to identify sequences in the size range that can serve as target sequences. By moving the sequence “window” progressively one nucleotide upstream or downstream of an initial target sequence location, the next potential target sequence can be identified, until the complete set of possible sequences is identified for any given target size selected. This process, coupled with systematic synthesis and testing of the identified sequences (using assays as described herein or as known in the art) to identify those sequences that perform optimally can identify those RNA sequences that, when targeted with an antisense polynucleotide agent, mediate the best inhibition of target gene expression. Thus, while the sequences identified, for example, in Table 4 or 5 represent effective target sequences, it is contemplated that further optimization of antisense inhibition efficiency can be achieved by progressively “walking the window” one nucleotide upstream or downstream of the given sequences to identify sequences with equal or better inhibition characteristics.

[0238] Further, it is contemplated that for any sequence identified, e.g., in Table 4 or 5, further optimization could be achieved by systematically either adding or removing nucleotides to generate longer or shorter sequences and testing those sequences generated by walking a window of the longer or shorter size up or down the target RNA from that point. Again, coupling this approach to generating new candidate targets with testing for effectiveness of antisense polynucleotide agents based on those target sequences in an inhibition assay as known in the art or as described herein can lead to further improvements in the efficiency of inhibition. Further still, such optimized sequences can be adjusted by, e.g., the introduction of modified nucleotides as described herein or as known in the art, addition or changes in length, or other modifications as known in the art or discussed herein to further optimize the molecule (e.g., increasing serum stability or circulating half-life, increasing thermal stability, enhancing transmembrane delivery, targeting to a particular location or cell type, increasing interaction with silencing pathway enzymes, increasing release from endosomes) as an expression inhibitor.

### iii. Modified Oligonucleotides of the Invention

[0239] In certain embodiments, the oligonucleotides of the invention e.g., dsRNA agents or antisense polynucleotide agents, are un-modified, and do not comprise, e.g., chemical modifications or conjugations known in the art and described herein. In other embodiments, the oligonucleotides, of the invention, e.g., a dsRNA or antisense polynucleotide agent, is chemically modified to enhance stability or other beneficial characteristics. In certain embodiments of the invention, substantially all of the nucleotides of an oligonucleotide, e.g., dsRNA agent or antisense polynucleotide agent of the invention are modified. In other embodiments of the invention, all of the nucleotides of an oligonucleotide, e.g., dsRNA agent or antisense polynucleotide agent, or substantially all of the nucleotides of an oligonucleotide, e.g., dsRNA agent or antisense polynucleotide agent, are modified, i.e., not more than 5, 4, 3, 2, or 1 unmodified nucleotides are present in a strand of the oligonucleotide, e.g., dsRNA agent or antisense polynucleotide agent.

[0240] The nucleic acids featured in the invention can be synthesized or modified by methods well established in the art, such as those described in “Current protocols in nucleic acid chemistry,” Beaucage, S. L. et al. (Edrs.), John Wiley & Sons, Inc., New York, NY, USA, which is hereby incorporated herein by reference. Modifications include, for example, end modifications, e.g., 5′-end modifications (phosphorylation, conjugation, inverted linkages) or 3′-end modifications (conjugation, DNA nucleotides, inverted linkages, etc.); base modifications, e.g., replacement with stabilizing bases, destabilizing bases, or bases that base pair with an expanded repertoire of partners, removal of bases (abasic nucleotides), or conjugated bases; sugar modifications (e.g., at the 2′-position or 4′-position) or replacement of the sugar; or backbone modifications, including modification or replacement of the phosphodiester linkages. Specific examples of oligonucleotide compounds useful in the embodiments described herein include, but are not limited to oligonucleotides, e.g., RNAs, containing modified backbones or no natural internucleoside linkages. Oligonucleotides, e.g., RNAs having modified backbones include, among others, those that do not have a phosphorus atom in the backbone. For the purposes of this specification, and as sometimes referenced in the art, modified oligonucleotides, e.g., RNAs, that do not have a phosphorus atom in their internucleoside backbone can also be considered to be oligonucleosides. In some embodiments, a modified oligonucleotide will have a phosphorus atom in its internucleoside backbone.

[0241] Modified oligonucleotide backbones include, for example, phosphorothioates, chiral phosphorothioates, phosphorodithioates, phosphotriesters, aminoalkylphosphotriesters, methyl and other alkyl phosphonates including 3′-alkylene phosphonates and chiral phosphonates, phosphinates, phosphoramidates including 3′-amino phosphoramidate and aminoalkylphosphoramidates, thionophosphoramidates, thionoalkylphosphonates, thionoalkylphosphotriesters, and boranophosphates having normal 3′-5′ linkages, 2′-5′-linked analogs of these, and those having inverted polarity wherein the adjacent pairs of nucleoside units are linked 3′-5′ to 5′-3′ or 2′-5′ to 5′-2′. Various salts, mixed salts and free acid forms are also included. In some embodiments of the invention, the oligonucleotides, e.g., dsRNA agents or antisense polynucleotide agents, of the invention are in a free acid form. In other embodiments of the invention, the oligonucleotides, e.g., dsRNA agents or antisense polynucleotide agents, are in a salt form. In one embodiment, the oligonucleotides, e.g., dsRNA agents or antisense polynucleotide agents, of the invention are in a sodium salt form. In certain embodiments, when the oligonucleotides, e.g., dsRNA agents or antisense polynucleotide agents, of the invention are in the sodium salt form, sodium ions are present in the agent as counterions for substantially all of the phosphodiester and/or phosphorothiotate groups present in the agent. Oligonucleotides in which substantially all of the phosphodiester and/or phosphorothioate linkages have a sodium counterion include not more than 5, 4, 3, 2, or 1 phosphodiester and/or phosphorothioate linkages without a sodium counterion. In some embodiments, when the oligonucleotides, e.g., dsRNA agents or antisense polynucleotide agents, of the invention are in the sodium salt form, sodium ions are present in the oligonucleotide as counterions for all of the phosphodiester and/or phosphorothiotate groups present in the agent.

[0242] Representative U.S. patents that teach the preparation of the above phosphorus-containing linkages include, but are not limited to, U.S. Pat. Nos. 3,687,808; 4,469,863; 4,476,301; 5,023,243; 5,177,195; 5,188,897; 5,264,423; 5,276,019; 5,278,302; 5,286,717; 5,321,131; 5,399,676; 5,405,939; 5,453,496; 5,455,233; 5,466,677; 5,476,925; 5,519,126; 5,536,821; 5,541,316; 5,550,111; 5,563,253; 5,571,799; 5,587,361; 5,625,050; 6,028,188; 6,124,445; 6,160,109; 6,169,170; 6,172,209; 6,239,265; 6,277,603; 6,326,199; 6,346,614; 6,444,423; 6,531,590; 6,534,639; 6,608,035; 6,683,167; 6,858,715; 6,867,294; 6,878,805; 7,015,315; 7,041,816; 7,273,933; 7,321,029; and U.S. Pat. RE39464, the entire contents of each of which are hereby incorporated herein by reference.

[0243] Modified oligonucleotide, e.g., RNA, backbones that do not include a phosphorus atom therein have backbones that are formed by short chain alkyl or cycloalkyl internucleoside linkages, mixed heteroatoms and alkyl or cycloalkyl internucleoside linkages, or one or more short chain heteroatomic or heterocyclic internucleoside linkages. These include those having morpholino linkages (formed in part from the sugar portion of a nucleoside); siloxane backbones; sulfide, sulfoxide and sulfone backbones; formacetyl and thioformacetyl backbones; methylene formacetyl and thioformacetyl backbones; alkene containing backbones; sulfamate backbones; methyleneimino and methylenehydrazino backbones; sulfonate and sulfonamide backbones; amide backbones; and others having mixed N, O, S, and CH2 component parts.

[0244] Representative U.S. patents that teach the preparation of the above oligonucleosides include, but are not limited to, U.S. Pat. Nos. 5,034,506; 5,166,315; 5,185,444; 5,214,134; 5,216,141; 5,235,033; 5,64,562; 5,264,564; 5,405,938; 5,434,257; 5,466,677; 5,470,967; 5,489,677; 5,541,307; 5,561,225; 5,596,086; 5,602,240; 5,608,046; 5,610,289; 5,618,704; 5,623,070; 5,663,312; 5,633,360; 5,677,437; and 5,677,439, the entire contents of each of which are hereby incorporated herein by reference.

[0245] Suitable RNA mimetics are contemplated for use in oligonucleotides, e.g., dsRNA agents or antisense polynucleotide agents, provided herein, in which both the sugar and the internucleoside linkage, i.e., the backbone, of the nucleotide units are replaced with novel groups. The base units are maintained for hybridization with an appropriate nucleic acid target compound. One such oligomeric compound in which an RNA mimetic that has been shown to have excellent hybridization properties is referred to as a peptide nucleic acid (PNA). In PNA compounds, the sugar backbone of an RNA is replaced with an amide containing backbone, in particular an aminoethylglycine backbone. The nucleobases are retained and are bound directly or indirectly to aza nitrogen atoms of the amide portion of the backbone. Representative US patents that teach the preparation of PNA compounds include, but are not limited to, U.S. Pat. Nos. 5,539,082; 5,714,331; and 5,719,262, the entire contents of each of which are hereby incorporated herein by reference. Additional PNA compounds suitable for use in the oligonucleotides, e.g., iRNAs of the invention are described in, for example, in Nielsen et al., Science, 1991, 254, 1497-1500.

[0246] Some embodiments featured in the invention include oligonucleotides with phosphorothioate backbones and oligonucleosides with heteroatom backbones, and in particular —CH₂—NH—CH₂—, —CH₂—N(CH₃)—O—CH₂— [known as a methylene (methylimino) or MMI backbone], —CH₂—O—N(CH₃)—CH₂—, —CH₂—N(CH₃)—N(CH₃)—CH₂— and —N(CH₃)—CH₂—CH₂— of the above-referenced U.S. Pat. No. 5,489,677, and the amide backbones of the above-referenced U.S. Pat. No. 5,602,240. In some embodiments, the RNAs featured herein have morpholino backbone structures of the above-referenced U.S. Pat. No. 5,034,506. The native phosphodiester backbone can be represented as O—P(O)(OH)—OCH2-.

[0247] Modified oligonucleotides can also contain one or more substituted sugar moieties. The oligonucleotides, e.g., dsRNA agents or antisense polynucleotide agents, featured herein can include one of the following at the 2′-position: OH; F; O—, S—, or N-alkyl; O—, S—, or N-alkenyl; O—, S- or N-alkynyl; or O-alkyl-O-alkyl, wherein the alkyl, alkenyl and alkynyl can be substituted or unsubstituted C₁ to C₁₀ alkyl or C₂ to C₁₀ alkenyl and alkynyl. Exemplary suitable modifications include O[(CH₂)ₙO]ₘCH₃, O(CH₂)·ₙOCH₃, O(CH₂)ₙNH₂, O(CH₂)ₙCH₃, O(CH₂)ₙONH₂, and O(CH₂)ₙON[(CH₂)ₙCH₃)]₂, where n and m are from 1 to about 10. In other embodiments, dsRNAs include one of the following at the 2′ position: C₁ to C₁₀ lower alkyl, substituted lower alkyl, alkaryl, aralkyl, O-alkaryl or O-aralkyl, SH, SCH₃, OCN, Cl, Br, CN, CF₃, OCF₃, SOCH₃, SO₂CH₃, ONO₂, NO₂, N₃, NH₂, heterocycloalkyl, heterocycloalkaryl, aminoalkylamino, polyalkylamino, substituted silyl, an RNA cleaving group, a reporter group, an intercalator, a group for improving the pharmacokinetic properties of an oligonucleotide, or a group for improving the pharmacodynamic properties of an oligonucleotide, and other substituents having similar properties. In some embodiments, the modification includes a 2′-methoxyethoxy (2′-O—CH₂CH₂OCH₃, also known as 2′-O-(2-methoxyethyl) or 2′-MOE) (Martin et al., Helv. Chim. Acta, 1995, 78:486-504) i.e., an alkoxy-alkoxy group. Another exemplary modification is 2′-dimethylaminooxyethoxy, i.e., a O(CH₂)₂ON(CH₃)₂ group, also known as 2′-DMAOE, as described in examples herein below, and 2′-dimethylaminoethoxyethoxy (also known in the art as 2′-O-dimethylaminoethoxyethyl or 2′-DMAEOE), i.e., 2′-O—CH₂—O—CH₂—N(CH₃)₂. Further exemplary modifications include: 5′-Me-2′-F nucleotides, 5′-Me-2′-OMe nucleotides, 5′-Me-2′-deoxynucleotides, (both R and S isomers in these three families); 2′-alkoxyalkyl; and 2′-NMA (N-methylacetamide).

[0248] Other modifications include 2′-methoxy (2′-OCH₃), 2′-aminopropoxy (2′-OCH₂CH₂CH₂NH₂) and 2′-fluoro (2′-F). Similar modifications can also be made at other positions on the RNA of an iRNA, particularly the 3′ position of the sugar on the 3′ terminal nucleotide or in 2′-5′ linked dsRNAs and the 5′ position of 5′ terminal nucleotide. Oligonucleotides, e.g., dsRNA agents or antisense polynucleotide agents, can also have sugar mimetics such as cyclobutyl moieties in place of the pentofuranosyl sugar. Representative US patents that teach the preparation of such modified sugar structures include, but are not limited to, U.S. Pat. Nos. 4,981,957; 5,118,800; 5,319,080; 5,359,044; 5,393,878; 5,446,137; 5,466,786; 5,514,785; 5,519,134; 5,567,811; 5,576,427; 5,591,722; 5,597,909; 5,610,300; 5,627,053; 5,639,873; 5,646,265; 5,658,873; 5,670,633; and 5,700,920, certain of which are commonly owned with the instant application. The entire contents of each of the foregoing are hereby incorporated herein by reference.

[0249] An oligonucleotide, e.g., dsRNA agent or antisense polynucleotide agent, can also include nucleobase (often referred to in the art simply as “base”) modifications or substitutions. As used herein, “unmodified” or “natural” nucleobases include the purine bases adenine (A) and guanine (G), and the pyrimidine bases thymine (T), cytosine (C), and uracil (U). Modified nucleobases include other synthetic and natural nucleobases such as deoxythimidine (dT), 5-methylcytosine (5-me-C), 5-hydroxymethyl cytosine, xanthine, hypoxanthine, 2-aminoadenine, 6-methyl and other alkyl derivatives of adenine and guanine, 2-propyl and other alkyl derivatives of adenine and guanine, 2-thiouracil, 2-thiothymine and 2-thiocytosine, 5-halouracil and cytosine, 5-propynyl uracil and cytosine, 6-azo uracil, cytosine and thymine, 5-uracil (pseudouracil), 4-thiouracil, 8-halo, 8-amino, 8-thiol, 8-thioalkyl, 8-hydroxyl anal other 8-substituted adenines and guanines, 5-halo, particularly 5-bromo, 5-trifluoromethyl and other 5-substituted uracils and cytosines, 7-methylguanine and 7-methyladenine, 8-azaguanine and 8-azaadenine, 7-deazaguanine and 7-daazaadenine and 3-deazaguanine and 3-deazaadenine. Further nucleobases include those disclosed in U.S. Pat. No. 3,687,808, those disclosed in Modified Nucleosides in Biochemistry, Biotechnology and Medicine, Herdewijn, P. ed. Wiley-VCH, 2008; those disclosed in The Concise Encyclopedia Of Polymer Science And Engineering, pages 858-859, Kroschwitz, J. L, ed. John Wiley & Sons, 1990, these disclosed by Englisch et al., Angewandte Chemie, International Edition, 1991, 30, 613, and those disclosed by Sanghvi, Y S., Chapter 15, dsRNA Research and Applications, pages 289-302, Crooke, S. T. and Lebleu, B., Ed., CRC Press, 1993. Certain of these nucleobases are particularly useful for increasing the binding affinity of the oligomeric compounds featured in the invention. These include 5-substituted pyrimidines, 6-azapyrimidines and N-2, N-6 and 0-6 substituted purines, including 2-aminopropyladenine, 5-propynyluracil and 5-propynylcytosine. 5-methylcytosine substitutions have been shown to increase nucleic acid duplex stability by 0.6-1.2° C. (Sanghvi, Y. S., Crooke, S. T. and Lebleu, B., Eds., dsRNA Research and Applications, CRC Press, Boca Raton, 1993, pp. 276-278) and are exemplary base substitutions, even more particularly when combined with 2′-O-methoxyethyl sugar modifications.

[0250] Representative U.S. patents that teach the preparation of certain of the above noted modified nucleobases as well as other modified nucleobases include, but are not limited to, the above noted U.S. Pat. Nos. 3,687,808, 4,845,205; 5,130,30; 5,134,066; 5,175,273; 5,367,066; 5,432,272; 5,457,187; 5,459,255; 5,484,908; 5,502,177; 5,525,711; 5,552,540; 5,587,469; 5,594,121, 5,596,091; 5,614,617; 5,681,941; 5,750,692; 6,015,886; 6,147,200; 6,166,197; 6,222,025; 6,235,887; 6,380,368; 6,528,640; 6,639,062; 6,617,438; 7,045,610; 7,427,672; and 7,495,088, the entire contents of each of which are hereby incorporated herein by reference.

[0251] In some embodiments, an oligonucleotide, e.g., dsRNA agent or antisense polynucleotide agent, of the disclosure can also be modified to include one or more bicyclic sugar moieties. A “bicyclic sugar” is a furanosyl ring modified by a ring formed by the bridging of two carbons, whether adjacent or non-adjacent. A “bicyclic nucleoside” (“BNA”) is a nucleoside having a sugar moiety comprising a ring formed by bridging two carbons, whether adjacent or non-adjacent, of the sugar ring, thereby forming a bicyclic ring system. In certain embodiments, the bridge connects the 4′-carbon and the 2′-carbon of the sugar ring, optionally, via the 2′-acyclic oxygen atom. Thus, in some embodiments an agent of the invention may include one or more locked nucleic acids (LNA). A locked nucleic acid is a nucleotide having a modified ribose moiety in which the ribose moiety comprises an extra bridge connecting the 2′ and 4′ carbons. In other words, an LNA is a nucleotide comprising a bicyclic sugar moiety comprising a 4′-CH₂—O-2′ bridge. This structure effectively “locks” the ribose in the 3′-endo structural conformation. The addition of locked nucleic acids to siRNAs has been shown to increase siRNA stability in serum, and to reduce off-target effects (Elmen, J. et al., (2005) Nucleic Acids Research 33(1):439-447; Mook, OR. et al., (2007) Mol Canc Ther 6(3):833-843; Grunweller, A. et al., (2003) Nucleic Acids Research 31(12):3185-3193). Examples of bicyclic nucleosides for use in the polynucleotides of the invention include without limitation nucleosides comprising a bridge between the 4′ and the 2′ ribosyl ring atoms. In certain embodiments, the antisense polynucleotide agents of the invention include one or more bicyclic nucleosides comprising a 4′ to 2′ bridge.

[0252] A locked nucleoside can be represented by the structure (omitting stereochemistry),

[chemical structure]

[0253] wherein B is a nucleobase or modified nucleobase and L is the linking group that joins the 2′-carbon to the 4′-carbon of the ribose ring. Examples of such 4′ to 2′ bridged bicyclic nucleosides, include but are not limited to 4′-(CH₂)—O-2′ (LNA); 4′-(CH₂)—S-2′; 4′-(CH₂)₂-O-2′ (ENA); 4′-CH(CH₃)—O-2′ (also referred to as “constrained ethyl” or “cEt”) and 4′-CH(CH₂OCH₃)—O-2′ (and analogs thereof; see, e.g., U.S. Pat. No. 7,399,845); 4′-C(CH₃)(CH₃)—O-2′ (and analogs thereof; see e.g., U.S. Pat. No. 8,278,283); 4′-CH₂—N(OCH₃)-2′ (and analogs thereof; see e.g., U.S. Pat. No. 8,278,425); 4′-CH₂—O—N(CH₃)-2′ (see, e.g., U.S. Patent Publication No. 2004/0171570); 4′-CH₂—N(R)—O-2′, wherein R is H, C1-C12 alkyl, or a nitrogen protecting group (see, e.g., U.S. Pat. No. 7,427,672); 4′-CH₂—C(H)(CH₃)-2′ (see, e.g., Chattopadhyaya et al., J. Org. Chem., 2009, 74, 118-134); and 4′-CH₂—C(═CH₂)-2′ (and analogs thereof; see, e.g., U.S. Pat. No. 8,278,426). The entire contents of each of the foregoing are hereby incorporated herein by reference.

[0254] Additional representative U.S. patents and U.S. patenttent Publications that teach the preparation of locked nucleic acid nucleotides include, but are not limited to, the following: U.S. Pat. Nos. 6,268,490; 6,525,191; 6,670,461; 6,770,748; 6,794,499; 6,998,484; 7,053,207; 7,034,133; 7,084,125; 7,399,845; 7,427,672; 7,569,686; 7,741,457; 8,022,193; 8,030,467; 8,278,425; 8,278,426; 8,278,283; US 2008/0039618; and US 2009/0012281, the entire contents of each of which are hereby incorporated herein by reference.

[0255] Any of the foregoing bicyclic nucleosides can be prepared having one or more stereochemical sugar configurations including for example α-L-ribofuranose and β-D-ribofuranose (see WO 99/14226).

[0256] A nucleotide of an oligonucleotide, e.g., dsRNA agent or antisense polynucleotide agent, can also be modified to include one or more constrained ethyl nucleotides. As used herein, a “constrained ethyl nucleotide” or “cEt” is a locked nucleic acid comprising a bicyclic sugar moiety comprising a 4′-CH(CH₃)—O-2′ bridge (i.e., L in the preceding structure). In one embodiment, a constrained ethyl nucleotide is in the S conformation referred to herein as “S-cEt.”

[0257] An oligonucleotide, e.g., dsRNA agent or antisense polynucleotide agent, of the invention may also include one or more “conformationally restricted nucleotides” (“CRN”). CRN are nucleotide analogs with a linker connecting the C2′ and C4′ carbons of ribose or the C3 and —C5′ carbons of ribose. CRN lock the ribose ring into a stable conformation and increase the hybridization affinity to mRNA. The linker is of sufficient length to place the oxygen in an optimal position for stability and affinity resulting in less ribose ring puckering.

[0258] Representative publications that teach the preparation of certain of the above noted CRN include, but are not limited to, U.S. Patent Publication No. 2013/0190383; and PCT publication WO 2013/036868, the entire contents of each of which are hereby incorporated herein by reference.

[0259] In some embodiments, an oligonucleotide, e.g., dsRNA agent or antisense polynucleotide agent, of the invention comprises one or more monomers that are UNA (unlocked nucleic acid) nucleotides. UNA is unlocked acyclic nucleic acid, wherein any of the bonds of the sugar has been removed, forming an unlocked “sugar” residue. In one example, UNA also encompasses monomer with bonds between C1′-C4′ have been removed (i.e. the covalent carbon-oxygen-carbon bond between the C1′ and C4′ carbons). In another example, the C2′-C3′ bond (i.e. the covalent carbon-carbon bond between the C2′ and C3′ carbons) of the sugar has been removed (see Nuc. Acids Symp. Series, 52, 133-134 (2008) and Fluiter et al., Mol. Biosyst., 2009, 10, 1039 hereby incorporated by reference).

[0260] Representative U.S. publications that teach the preparation of UNA include, but are not limited to, U.S. Pat. No. 8,314,227; and U.S. Patent Publication Nos. 2013/0096289; 2013/0011922; and 2011/0313020, the entire contents of each of which are hereby incorporated herein by reference.

[0261] Potentially stabilizing modifications to the ends of oligonucleotides, e.g., RNA, molecules can include N-(acetylaminocaproyl)-4-hydroxyprolinol (Hyp-C6-NHAc), N-(caproyl-4-hydroxyprolinol (Hyp-C6), N-(acetyl-4-hydroxyprolinol (Hyp-NHAc), thymidine-2′-O-deoxythymidine (ether), N-(aminocaproyl)-4-hydroxyprolinol (Hyp-C6-amino), 2-docosanoyl-uridine-3″-phosphate, inverted base dT(idT) and others. Disclosure of this modification can be found in PCT Publication No. WO 2011/005861.

[0262] Other modifications of the nucleotides of e.g., a dsRNA agent or an antisense polynucleotide agent, of the invention include a 5′ phosphate or 5′ phosphate mimic, e.g., a 5′-terminal phosphate or phosphate mimic on the antisense strand of an iRNA. Suitable phosphate mimics are disclosed in, for example U.S. Patent Publication No. 2012/0157511, the entire contents of which are incorporated herein by reference.

### iv. Modified iRNAs Comprising Motifs of the Invention

[0263] In certain aspects of the invention, the double stranded RNA agents of the invention include agents with chemical modifications as disclosed, for example, in WO2013/075035, the entire contents of each of which are incorporated herein by reference. As shown herein and in WO2013/075035, one or more motifs of three identical modifications on three consecutive nucleotides may be introduced into a sense strand or antisense strand of a dsRNAi agent, particularly at or near the cleavage site. In some embodiments, the sense strand and antisense strand of the dsRNAi agent may otherwise be completely modified. The introduction of these motifs interrupts the modification pattern, if present, of the sense or antisense strand. The dsRNAi agent may be optionally conjugated with a GalNAc derivative ligand, for instance on the sense strand.

[0264] More specifically, when the sense strand and antisense strand of the double stranded RNA agent are completely modified to have one or more motifs of three identical modifications on three consecutive nucleotides at or near the cleavage site of at least one strand of a dsRNAi agent, the gene silencing activity of the dsRNAi agent was observed.

[0265] Accordingly, the invention provides double stranded RNA agents capable of inhibiting the expression of a target gene (i.e., INHBE gene) in vivo. The RNAi agent comprises a sense strand and an antisense strand. Each strand of the RNAi agent may be, for example, 17-30 nucleotides in length, 25-30 nucleotides in length, 27-30 nucleotides in length, 19-25 nucleotides in length, 19-23 nucleotides in length, 19-21 nucleotides in length, 21-25 nucleotides in length, or 21-23 nucleotides in length.

[0266] The sense strand and antisense strand typically form a duplex double stranded RNA (“dsRNA”), also referred to herein as “dsRNAi agent.” The duplex region of a dsRNAi agent may be, for example, the duplex region can be 27-30 nucleotide pairs in length, 19-25 nucleotide pairs in length, 19-23 nucleotide pairs in length, 19-21 nucleotide pairs in length, 21-25 nucleotide pairs in length, or 21-23 nucleotide pairs in length. In another example, the duplex region is selected from 19, 20, 21, 22, 23, 24, 25, 26, and 27 nucleotides in length.

[0267] In certain embodiments, the dsRNAi agent may contain one or more overhang regions or capping groups at the 3′-end, 5′-end, or both ends of one or both strands. The overhang can be, independently, 1-6 nucleotides in length, for instance 2-6 nucleotides in length, 1-5 nucleotides in length, 2-5 nucleotides in length, 1-4 nucleotides in length, 2-4 nucleotides in length, 1-3 nucleotides in length, 2-3 nucleotides in length, or 1-2 nucleotides in length. In certain embodiments, the overhang regions can include extended overhang regions as provided above. The overhangs can be the result of one strand being longer than the other, or the result of two strands of the same length being staggered. The overhang can form a mismatch with the target mRNA or it can be complementary to the gene sequences being targeted or can be another sequence. The first and second strands can also be joined, e.g., by additional bases to form a hairpin, or by other non-base linkers.

[0268] In certain embodiments, the nucleotides in the overhang region of the dsRNAi agent can each independently be a modified or unmodified nucleotide including, but no limited to 2′-sugar modified, such as, 2′-F, 2′-O-methyl, thymidine (T), 2′-O-methoxyethyl-5-methyluridine (Teo), 2′-O-methoxyethyladenosine (Aeo), 2′-O-methoxyethyl-5-methylcytidine (m5Ceo), and any combinations thereof.

[0269] For example, TT can be an overhang sequence for either end on either strand. The overhang can form a mismatch with the target mRNA or it can be complementary to the gene sequences being targeted or can be another sequence.

[0270] The 5′- or 3′-overhangs at the sense strand, antisense strand, or both strands of the dsRNAi agent may be phosphorylated. In some embodiments, the overhang region(s) contains two nucleotides having a phosphorothioate between the two nucleotides, where the two nucleotides can be the same or different. In some embodiments, the overhang is present at the 3′-end of the sense strand, antisense strand, or both strands. In some embodiments, this 3′-overhang is present in the antisense strand. In some embodiments, this 3′-overhang is present in the sense strand.

[0271] The dsRNAi agent may contain only a single overhang, which can strengthen the interference activity of the RNAi, without affecting its overall stability. For example, the single-stranded overhang may be located at the 3′-end of the sense strand or, alternatively, at the 3-end of the antisense strand. The RNAi may also have a blunt end, located at the 5′-end of the antisense strand (i.e., the 3′-end of the sense strand) or vice versa. Generally, the antisense strand of the dsRNAi agent has a nucleotide overhang at the 3′-end, and the 5′-end is blunt. While not wishing to be bound by theory, the asymmetric blunt end at the 5′-end of the antisense strand and 3′-end overhang of the antisense strand favor the guide strand loading into RISC process.

[0272] In certain embodiments, the dsRNAi agent is a double blunt-ended of 19 nucleotides in length, wherein the sense strand contains at least one motif of three 2′-F modifications on three consecutive nucleotides at positions 7, 8, 9 from the 5′end. The antisense strand contains at least one motif of three 2′-O-methyl modifications on three consecutive nucleotides at positions 11, 12, and 13 from the 5′end.

[0273] In other embodiments, the dsRNAi agent is a double blunt-ended of 20 nucleotides in length, wherein the sense strand contains at least one motif of three 2′-F modifications on three consecutive nucleotides at positions 8, 9, and 10 from the 5′end. The antisense strand contains at least one motif of three 2′-O-methyl modifications on three consecutive nucleotides at positions 11, 12, and 13 from the 5′end.

[0274] In yet other embodiments, the dsRNAi agent is a double blunt-ended of 21 nucleotides in length, wherein the sense strand contains at least one motif of three 2′-F modifications on three consecutive nucleotides at positions 9, 10, and 11 from the 5′end. The antisense strand contains at least one motif of three 2′-O-methyl modifications on three consecutive nucleotides at positions 11, 12, and 13 from the 5′end.

[0275] In certain embodiments, the dsRNAi agent comprises a 21 nucleotide sense strand and a 23 nucleotide antisense strand, wherein the sense strand contains at least one motif of three 2′-F modifications on three consecutive nucleotides at positions 9, 10, and 11 from the 5′end; the antisense strand contains at least one motif of three 2′-O-methyl modifications on three consecutive nucleotides at positions 11, 12, and 13 from the 5′end, wherein one end of the RNAi agent is blunt, while the other end comprises a 2 nucleotide overhang. In one embodiment, the 2 nucleotide overhang is at the 3′-end of the antisense strand.

[0276] When the 2 nucleotide overhang is at the 3′-end of the antisense strand, there may be two phosphorothioate internucleotide linkages between the terminal three nucleotides, wherein two of the three nucleotides are the overhang nucleotides, and the third nucleotide is a paired nucleotide next to the overhang nucleotide. In one embodiment, the RNAi agent additionally has two phosphorothioate internucleotide linkages between the terminal three nucleotides at both the 5′-end of the sense strand and at the 5′-end of the antisense strand. In certain embodiments, every nucleotide in the sense strand and the antisense strand of the dsRNAi agent, including the nucleotides that are part of the motifs are modified nucleotides. In certain embodiments each residue is independently modified with a 2′-O-methyl or 3′-fluoro, e.g., in an alternating motif. Optionally, the dsRNAi agent further comprises a ligand (such as, GalNAc₃).

[0277] In certain embodiments, the dsRNAi agent comprises a sense and an antisense strand, wherein the sense strand is 25-30 nucleotide residues in length, wherein starting from the 5′ terminal nucleotide (position 1) positions 1 to 23 of the first strand comprise at least 8 ribonucleotides; the antisense strand is 36-66 nucleotide residues in length and, starting from the 3′ terminal nucleotide, comprises at least 8 ribonucleotides in the positions paired with positions 1-23 of sense strand to form a duplex; wherein at least the 3′terminal nucleotide of antisense strand is unpaired with sense strand, and up to 6 consecutive 3′ terminal nucleotides are unpaired with sense strand, thereby forming a 3′ single stranded overhang of 1-6 nucleotides; wherein the 5′ terminus of antisense strand comprises from 10-30 consecutive nucleotides which are unpaired with sense strand, thereby forming a 10-30 nucleotide single stranded 5′ overhang; wherein at least the sense strand 5′ terminal and 3′ terminal nucleotides are base paired with nucleotides of antisense strand when sense and antisense strands are aligned for maximum complementarity, thereby forming a substantially duplexed region between sense and antisense strands; and antisense strand is sufficiently complementary to a target RNA along at least 19 ribonucleotides of antisense strand length to reduce target gene expression when the double stranded nucleic acid is introduced into a mammalian cell; and wherein the sense strand contains at least one motif of three 2′-F modifications on three consecutive nucleotides, where at least one of the motifs occurs at or near the cleavage site. The antisense strand contains at least one motif of three 2′-O-methyl modifications on three consecutive nucleotides at or near the cleavage site.

[0278] In certain embodiments, the dsRNAi agent comprises sense and antisense strands, wherein the dsRNAi agent comprises a first strand having a length which is at least 25 and at most 29 nucleotides and a second strand having a length which is at most 30 nucleotides with at least one motif of three 2′-O-methyl modifications on three consecutive nucleotides at position 11, 12, 13 from the 5′ end; wherein the 3′ end of the first strand and the 5′ end of the second strand form a blunt end and the second strand is 1-4 nucleotides longer at its 3′ end than the first strand, wherein the duplex region which is at least 25 nucleotides in length, and the second strand is sufficiently complementary to a target mRNA along at least 19 nucleotide of the second strand length to reduce target gene expression when the RNAi agent is introduced into a mammalian cell, and wherein Dicer cleavage of the dsRNAi agent results in an siRNA comprising the 3′-end of the second strand, thereby reducing expression of the target gene in the mammal. Optionally, the dsRNAi agent further comprises a ligand.

[0279] In certain embodiments, the sense strand of the dsRNAi agent contains at least one motif of three identical modifications on three consecutive nucleotides, where one of the motifs occurs at the cleavage site in the sense strand.

[0280] In certain embodiments, the antisense strand of the dsRNAi agent can also contain at least one motif of three identical modifications on three consecutive nucleotides, where one of the motifs occurs at or near the cleavage site in the antisense strand.

[0281] For a dsRNAi agent having a duplex region of 19-23 nucleotides in length, the cleavage site of the antisense strand is typically around the 10, 11, and 12 positions from the 5′-end. Thus the motifs of three identical modifications may occur at the 9, 10, 11 positions; the 10, 11, 12 positions; the 11, 12, 13 positions; the 12, 13, 14 positions; or the 13, 14, 15 positions of the antisense strand, the count starting from the first nucleotide from the 5′-end of the antisense strand, or, the count starting from the first paired nucleotide within the duplex region from the 5′-end of the antisense strand. The cleavage site in the antisense strand may also change according to the length of the duplex region of the dsRNAi agent from the 5′-end.

[0282] The sense strand of the dsRNAi agent may contain at least one motif of three identical modifications on three consecutive nucleotides at the cleavage site of the strand; and the antisense strand may have at least one motif of three identical modifications on three consecutive nucleotides at or near the cleavage site of the strand. When the sense strand and the antisense strand form a dsRNA duplex, the sense strand and the antisense strand can be so aligned that one motif of the three nucleotides on the sense strand and one motif of the three nucleotides on the antisense strand have at least one nucleotide overlap, i.e., at least one of the three nucleotides of the motif in the sense strand forms a base pair with at least one of the three nucleotides of the motif in the antisense strand.

[0283] Alternatively, at least two nucleotides may overlap, or all three nucleotides may overlap.

[0284] In some embodiments, the sense strand of the dsRNAi agent may contain more than one motif of three identical modifications on three consecutive nucleotides. The first motif may occur at or near the cleavage site of the strand and the other motifs may be a wing modification. The term “wing modification” herein refers to a motif occurring at another portion of the strand that is separated from the motif at or near the cleavage site of the same strand. The wing modification is either adjacent to the first motif or is separated by at least one or more nucleotides. When the motifs are immediately adjacent to each other then the chemistries of the motifs are distinct from each other, and when the motifs are separated by one or more nucleotide than the chemistries can be the same or different. Two or more wing modifications may be present. For instance, when two wing modifications are present, each wing modification may occur at one end relative to the first motif which is at or near cleavage site or on either side of the lead motif.

[0285] Like the sense strand, the antisense strand of the dsRNAi agent may contain more than one motif of three identical modifications on three consecutive nucleotides, with at least one of the motifs occurring at or near the cleavage site of the strand. This antisense strand may also contain one or more wing modifications in an alignment similar to the wing modifications that may be present on the sense strand.

[0286] In some embodiments, the wing modification on the sense strand or antisense strand of the dsRNAi agent typically does not include the first one or two terminal nucleotides at the 3′-end, 5′-end, or both ends of the strand.

[0287] In other embodiments, the wing modification on the sense strand or antisense strand of the dsRNAi agent typically does not include the first one or two paired nucleotides within the duplex region at the 3′-end, 5′-end, or both ends of the strand.

[0288] When the sense strand and the antisense strand of the dsRNAi agent each contain at least one wing modification, the wing modifications may fall on the same end of the duplex region, and have an overlap of one, two, or three nucleotides.

[0289] When the sense strand and the antisense strand of the dsRNAi agent each contain at least two wing modifications, the sense strand and the antisense strand can be so aligned that two modifications each from one strand fall on one end of the duplex region, having an overlap of one, two, or three nucleotides; two modifications each from one strand fall on the other end of the duplex region, having an overlap of one, two or three nucleotides; two modifications one strand fall on each side of the lead motif, having an overlap of one, two or three nucleotides in the duplex region.

[0290] In some embodiments, every nucleotide in the sense strand and antisense strand of the dsRNAi agent, including the nucleotides that are part of the motifs, may be modified. Each nucleotide may be modified with the same or different modification which can include one or more alteration of one or both of the non-linking phosphate oxygens or of one or more of the linking phosphate oxygens; alteration of a constituent of the ribose sugar, e.g., of the 2′-hydroxyl on the ribose sugar; wholesale replacement of the phosphate moiety with “dephospho” linkers; modification or replacement of a naturally occurring base; and replacement or modification of the ribose-phosphate backbone.

[0291] As nucleic acids are polymers of subunits, many of the modifications occur at a position which is repeated within a nucleic acid, e.g., a modification of a base, or a phosphate moiety, or a non-linking O of a phosphate moiety. In some cases the modification will occur at all of the subject positions in the nucleic acid but in many cases it will not. By way of example, a modification may only occur at a 3′- or 5′ terminal position, may only occur in a terminal region, e.g., at a position on a terminal nucleotide or in the last 2, 3, 4, 5, or 10 nucleotides of a strand. A modification may occur in a double strand region, a single strand region, or in both. A modification may occur only in the double strand region of an RNA or may only occur in a single strand region of a RNA. For example, a phosphorothioate modification at a non-linking O position may only occur at one or both termini, may only occur in a terminal region, e.g., at a position on a terminal nucleotide or in the last 2, 3, 4, 5, or 10 nucleotides of a strand, or may occur in double strand and single strand regions, particularly at termini. The 5′-end or ends can be phosphorylated.

[0292] It may be possible, e.g., to enhance stability, to include particular bases in overhangs, or to include modified nucleotides or nucleotide surrogates, in single strand overhangs, e.g., in a 5′- or 3′-overhang, or in both. For example, it can be desirable to include purine nucleotides in overhangs. In some embodiments all or some of the bases in a 3′- or 5′-overhang may be modified, e.g., with a modification described herein. Modifications can include, e.g., the use of modifications at the 2′ position of the ribose sugar with modifications that are known in the art, e.g., the use of deoxyribonucleotides, 2′-deoxy-2′-fluoro (2′-F) or 2′-O-methyl modified instead of the ribosugar of the nucleobase, and modifications in the phosphate group, e.g., phosphorothioate modifications. Overhangs need not be homologous with the target sequence.

[0293] In some embodiments, each residue of the sense strand and antisense strand is independently modified with LNA, CRN, cET, UNA, HNA, CeNA, 2′-methoxyethyl, 2′-O-methyl, 2′-O-allyl, 2′-C-allyl, 2′-deoxy, 2′-hydroxyl, or 2′-fluoro. The strands can contain more than one modification. In one embodiment, each residue of the sense strand and antisense strand is independently modified with 2′-O-methyl or 2′-fluoro.

[0294] At least two different modifications are typically present on the sense strand and antisense strand. Those two modifications may be the 2′-O-methyl or 2′-fluoro modifications, or others.

[0295] In certain embodiments, the Nₐ or N_{b} comprise modifications of an alternating pattern. The term “alternating motif” as used herein refers to a motif having one or more modifications, each modification occurring on alternating nucleotides of one strand. The alternating nucleotide may refer to one per every other nucleotide or one per every three nucleotides, or a similar pattern. For example, if A, B and C each represent one type of modification to the nucleotide, the alternating motif can be “ABABABABABAB . . . ,” “AABBAABBAABB . . . ,” “AABAABAABAAB . . . ,” “AAABAAABAAAB . . . ,” “AAABBBAAABBB . . . ,” or “ABCABCABCABC . . . ,” etc.

[0296] The type of modifications contained in the alternating motif may be the same or different. For example, if A, B, C, D each represent one type of modification on the nucleotide, the alternating pattern, i.e., modifications on every other nucleotide, may be the same, but each of the sense strand or antisense strand can be selected from several possibilities of modifications within the alternating motif such as “ABABAB . . . ”, “ACACAC . . . ” “BDBDBD . . . ” or “CDCDCD . . . ,” etc.

[0297] In some embodiments, the dsRNAi agent of the invention comprises the modification pattern for the alternating motif on the sense strand relative to the modification pattern for the alternating motif on the antisense strand is shifted. The shift may be such that the modified group of nucleotides of the sense strand corresponds to a differently modified group of nucleotides of the antisense strand and vice versa. For example, the sense strand when paired with the antisense strand in the dsRNA duplex, the alternating motif in the sense strand may start with “ABABAB” from 5′ to 3′ of the strand and the alternating motif in the antisense strand may start with “BABABA” from 5′ to 3′ of the strand within the duplex region. As another example, the alternating motif in the sense strand may start with “AABBAABB” from 5′ to 3′ of the strand and the alternating motif in the antisense strand may start with “BBAABBAA” from 5′ to 3′ of the strand within the duplex region, so that there is a complete or partial shift of the modification patterns between the sense strand and the antisense strand.

[0298] In some embodiments, the dsRNAi agent comprises the pattern of the alternating motif of 2′-O-methyl modification and 2′-F modification on the sense strand initially has a shift relative to the pattern of the alternating motif of 2′-O-methyl modification and 2′-F modification on the antisense strand initially, i.e., the 2′-O-methyl modified nucleotide on the sense strand base pairs with a 2′-F modified nucleotide on the antisense strand and vice versa. The 1 position of the sense strand may start with the 2′-F modification, and the 1 position of the antisense strand may start with the 2′-O-methyl modification.

[0299] The introduction of one or more motifs of three identical modifications on three consecutive nucleotides to the sense strand or antisense strand interrupts the initial modification pattern present in the sense strand or antisense strand. This interruption of the modification pattern of the sense or antisense strand by introducing one or more motifs of three identical modifications on three consecutive nucleotides to the sense or antisense strand may enhance the gene silencing activity against the target gene.

[0300] In some embodiments, when the motif of three identical modifications on three consecutive nucleotides is introduced to any of the strands, the modification of the nucleotide next to the motif is a different modification than the modification of the motif. For example, the portion of the sequence containing the motif is “ . . . NₐYYYN_{b} . . . ,” where “Y” represents the modification of the motif of three identical modifications on three consecutive nucleotide, and “Nₐ” and “N_{b}” represent a modification to the nucleotide next to the motif “YYY” that is different than the modification of Y, and where Nₐ and N_{b} can be the same or different modifications. Alternatively, Nₐ or N_{b} may be present or absent when there is a wing modification present.

[0301] The iRNA may further comprise at least one phosphorothioate or methylphosphonate internucleotide linkage. The phosphorothioate or methylphosphonate internucleotide linkage modification may occur on any nucleotide of the sense strand, antisense strand, or both strands in any position of the strand. For instance, the internucleotide linkage modification may occur on every nucleotide on the sense strand or antisense strand; each internucleotide linkage modification may occur in an alternating pattern on the sense strand or antisense strand; or the sense strand or antisense strand may contain both internucleotide linkage modifications in an alternating pattern. The alternating pattern of the internucleotide linkage modification on the sense strand may be the same or different from the antisense strand, and the alternating pattern of the internucleotide linkage modification on the sense strand may have a shift relative to the alternating pattern of the internucleotide linkage modification on the antisense strand. In one embodiment, a double-stranded RNAi agent comprises 6-8 phosphorothioate internucleotide linkages. In some embodiments, the antisense strand comprises two phosphorothioate internucleotide linkages at the 5′-end and two phosphorothioate internucleotide linkages at the 3′-end, and the sense strand comprises at least two phosphorothioate internucleotide linkages at either the 5′-end or the 3′-end.

[0302] In some embodiments, the dsRNAi agent comprises a phosphorothioate or methylphosphonate internucleotide linkage modification in the overhang region. For example, the overhang region may contain two nucleotides having a phosphorothioate or methylphosphonate internucleotide linkage between the two nucleotides. Internucleotide linkage modifications also may be made to link the overhang nucleotides with the terminal paired nucleotides within the duplex region. For example, at least 2, 3, 4, or all the overhang nucleotides may be linked through phosphorothioate or methylphosphonate internucleotide linkage, and optionally, there may be additional phosphorothioate or methylphosphonate internucleotide linkages linking the overhang nucleotide with a paired nucleotide that is next to the overhang nucleotide. For instance, there may be at least two phosphorothioate internucleotide linkages between the terminal three nucleotides, in which two of the three nucleotides are overhang nucleotides, and the third is a paired nucleotide next to the overhang nucleotide. These terminal three nucleotides may be at the 3′-end of the antisense strand, the 3′-end of the sense strand, the 5′-end of the antisense strand, or the 5′end of the antisense strand.

[0303] In some embodiments, the 2-nucleotide overhang is at the 3′-end of the antisense strand, and there are two phosphorothioate internucleotide linkages between the terminal three nucleotides, wherein two of the three nucleotides are the overhang nucleotides, and the third nucleotide is a paired nucleotide next to the overhang nucleotide. Optionally, the dsRNAi agent may additionally have two phosphorothioate internucleotide linkages between the terminal three nucleotides at both the 5′-end of the sense strand and at the 5′-end of the antisense strand.

[0304] In one embodiment, the dsRNAi agent comprises mismatch(es) with the target, within the duplex, or combinations thereof. The mismatch may occur in the overhang region or the duplex region. The base pair may be ranked on the basis of their propensity to promote dissociation or melting (e.g., on the free energy of association or dissociation of a particular pairing, the simplest approach is to examine the pairs on an individual pair basis, though next neighbor or similar analysis can also be used). In terms of promoting dissociation: A:U is preferred over G:C; G:U is preferred over G:C; and I:C is preferred over G:C (I=inosine). Mismatches, e.g., non-canonical or other than canonical pairings (as described elsewhere herein) are preferred over canonical (A:T, A:U, G:C) pairings; and pairings which include a universal base are preferred over canonical pairings.

[0305] In certain embodiments, the dsRNAi agent comprises at least one of the first 1, 2, 3, 4, or 5 base pairs within the duplex regions from the 5′-end of the antisense strand independently selected from the group of: A:U, G:U, I:C, and mismatched pairs, e.g., non-canonical or other than canonical pairings or pairings which include a universal base, to promote the dissociation of the antisense strand at the 5′-end of the duplex.

[0306] In certain embodiments, the nucleotide at the 1 position within the duplex region from the 5′-end in the antisense strand is selected from A, dA, dU, U, and dT. Alternatively, at least one of the first 1, 2, or 3 base pair within the duplex region from the 5′-end of the antisense strand is an AU base pair. For example, the first base pair within the duplex region from the 5′-end of the antisense strand is an AU base pair.

[0307] In other embodiments, the nucleotide at the 3′-end of the sense strand is deoxythimidine (dT) or the nucleotide at the 3′-end of the antisense strand is deoxythimidine (dT). For example, there is a short sequence of deoxythimidine nucleotides, for example, two dT nucleotides on the 3′-end of the sense, antisense strand, or both strands.

[0308] In certain embodiments, the sense strand sequence may be represented by formula (I):

(I)
5′ nₚ-Nₐ-(X X X )ᵢ-N_{b}-Y Y Y-N_{b}-(Z Z Z)ⱼ-Na-nq 3′

[0309] wherein:
[0310] i and j are each independently 0 or 1;
[0311] p and q are each independently 0-6;
[0312] each Nₐ independently represents an oligonucleotide sequence comprising 0-25 modified nucleotides, each sequence comprising at least two differently modified nucleotides;
[0313] each N_{b} independently represents an oligonucleotide sequence comprising 0-10 modified nucleotides;
[0314] each nₚ and n_{q} independently represent an overhang nucleotide;
[0315] wherein Nb and Y do not have the same modification; and
[0316] XXX, YYY, and ZZZ each independently represent one motif of three identical modifications on three consecutive nucleotides. In one embodiment, YYY is all 2′-F modified nucleotides.

[0317] In some embodiments, the Nₐ or N_{b} comprises modifications of alternating pattern.

[0318] In some embodiments, the YYY motif occurs at or near the cleavage site of the sense strand.

[0319] For example, when the dsRNAi agent has a duplex region of 17-23 nucleotides in length, the YYY motif can occur at or the vicinity of the cleavage site (e.g.: can occur at positions 6, 7, 8; 7, 8, 9; 8, 9, 10; 9, 10, 11; 10, 11,12; or 11, 12, 13) of the sense strand, the count starting from the first nucleotide, from the 5′-end; or optionally, the count starting at the first paired nucleotide within the duplex region, from the 5′-end.

[0320] In one embodiment, i is 1 and j is 0, or i is 0 and j is 1, or both i and j are 1. The sense strand can therefore be represented by the following formulas:

(Ib)
5′ nₚ-Nₐ-YYY-N_{b}-ZZZ-Nₐ-n_{q} 3′;
(Ic)
5′ nₚ-Nₐ-XXX-N_{b}-YYY-Nₐ-n_{q} 3′;
or
(Id)
5′ nₚ-Nₐ-XXX-N_{b}-YYY-N_{b}-ZZZ-Nₐ-n_{q} 3′.

[0321] When the sense strand is represented by formula (Ib), N_{b} represents an oligonucleotide sequence comprising 0-10, 0-7, 0-5, 0-4, 0-2, or 0 modified nucleotides. Each Nₐ independently can represent an oligonucleotide sequence comprising 2-20, 2-15, or 2-10 modified nucleotides.

[0322] When the sense strand is represented as formula (Ic), N_{b} represents an oligonucleotide sequence comprising 0-10, 0-7, 0-10, 0-7, 0-5, 0-4, 0-2, or 0 modified nucleotides. Each Nₐ can independently represent an oligonucleotide sequence comprising 2-20, 2-15, or 2-10 modified nucleotides.

[0323] When the sense strand is represented as formula (Id), each N_{b} independently represents an oligonucleotide sequence comprising 0-10, 0-7, 0-5, 0-4, 0-2, or 0 modified nucleotides. In one embodiment, N_{b} is 0, 1, 2, 3, 4, 5, or 6 Each Nₐ can independently represent an oligonucleotide sequence comprising 2-20, 2-15, or 2-10 modified nucleotides.

[0324] Each of X, Y and Z may be the same or different from each other.

[0325] In other embodiments, i is 0 and j is 0, and the sense strand may be represented by the formula:

(Ia)
5′ nₚ-Nₐ-YYY-Nₐ-n_{q} 3′.

[0326] When the sense strand is represented by formula (Ia), each Nₐ independently can represent an oligonucleotide sequence comprising 2-20, 2-15, or 2-10 modified nucleotides.

[0327] In one embodiment, the antisense strand sequence of the RNAi may be represented by formula (II):

(II)
5′ n_{q′}-Nₐ′-(Z′Z′Z′)ₖ-N_{b}′-Y′Y′Y′-
N_{b}′-(X′X′X′)ₗ-N′ₐ-nₚ′ 3′

[0328] wherein:
[0329] k and 1 are each independently 0 or 1;
[0330] p′ and q′ are each independently 0-6;
[0331] each Nₐ′ independently represents an oligonucleotide sequence comprising 0-25 modified nucleotides, each sequence comprising at least two differently modified nucleotides;
[0332] each N_{b}′ independently represents an oligonucleotide sequence comprising 0-10 modified nucleotides;
[0333] each nₚ′ and n_{q}′ independently represent an overhang nucleotide;
[0334] wherein N_{b}‘ and Y’ do not have the same modification; and
[0335] X′X′X′, Y′Y′Y′, and Z′Z′Z′ each independently represent one motif of three identical modifications on three consecutive nucleotides.

[0336] In some embodiments, the Nₐ′ or N_{b}′ comprises modifications of alternating pattern.

[0337] The Y′Y′Y′ motif occurs at or near the cleavage site of the antisense strand. For example, when the dsRNAi agent has a duplex region of 17-23 nucleotides in length, the Y′Y′Y′ motif can occur at positions 9, 10, 11; 10, 11, 12; 11, 12, 13; 12, 13, 14; or 13, 14, 15 of the antisense strand, with the count starting from the first nucleotide, from the 5′-end; or optionally, the count starting at the first paired nucleotide within the duplex region, from the 5′-end. In one embodiment, the Y′Y′Y′ motif occurs at positions 11, 12, 13.

[0338] In certain embodiments, Y′Y′Y′ motif is all 2′-OMe modified nucleotides.

[0339] In certain embodiments, k is 1 and 1 is 0, or k is 0 and 1 is 1, or both k and 1 are 1.

[0340] The antisense strand can therefore be represented b the following formulas:

(IIb)
5′ n_{q′}-Nₐ′-Z′Z′Z′-N_{b}′-Y′Y′Y′-Nₐ′-n_{p′} 3′;
(IIc)
5′ n_{q′}-Nₐ′-Y′Y′Y′-N_{b}′-X′X′X′-n_{p′} 3′;
or
(IId)
5′ n_{q′}-Nₐ′-Z′Z′Z′-ND′-Y′Y′Y′-N_{b}′-
X′X′X′-Nₐ′-n_{p′} 3′.

[0341] When the antisense strand is represented by formula (IIb), N_{b}′ represents an oligonucleotide sequence comprising 0-10, 0-7, 0-10, 0-7, 0-5, 0-4, 0-2, or 0 modified nucleotides. Each Nₐ′ independently represents an oligonucleotide sequence comprising 2-20, 2-15, or 2-10 modified nucleotides.

[0342] When the antisense strand is represented as formula (IIc), N_{b}′ represents an oligonucleotide sequence comprising 0-10, 0-7, 0-10, 0-7, 0-5, 0-4, 0-2, or 0 modified nucleotides. Each Nₐ′ independently represents an oligonucleotide sequence comprising 2-20, 2-15, or 2-10 modified nucleotides.

[0343] When the antisense strand is represented as formula (IId), each N_{b}′ independently represents an oligonucleotide sequence comprising 0-10, 0-7, 0-10, 0-7, 0-5, 0-4, 0-2, or 0 modified nucleotides. Each Nₐ′ independently represents an oligonucleotide sequence comprising 2-20, 2-15, or 2-10 modified nucleotides. In one embodiment, N_{b} is 0, 1, 2, 3, 4, 5, or 6.

[0344] In other embodiments, k is 0 and 1 is 0 and the antisense strand may be represented by the formula:

(Ia)
5′ n_{p′}-Nₐ′-Y′Y′Y′-Nₐ′-n_{q′} 3′.

[0345] When the antisense strand is represented as formula (IIa), each Nₐ′ independently represents an oligonucleotide sequence comprising 2-20, 2-15, or 2-10 modified nucleotides. Each of X′, Y′ and Z′ may be the same or different from each other.

[0346] Each nucleotide of the sense strand and antisense strand may be independently modified with LNA, CRN, UNA, cEt, HNA, CeNA, 2′-methoxyethyl, 2′-O-methyl, 2′-O-allyl, 2′-C-allyl, 2′-hydroxyl, or 2′-fluoro. For example, each nucleotide of the sense strand and antisense strand is independently modified with 2′-O-methyl or 2′-fluoro. Each X, Y, Z, X′, Y′, and Z′, in particular, may represent a 2′-O-methyl modification or a 2′-fluoro modification.

[0347] In some embodiments, the sense strand of the dsRNAi agent may contain YYY motif occurring at 9, 10, and 11 positions of the strand when the duplex region is 21 nt, the count starting from the first nucleotide from the 5′-end, or optionally, the count starting at the first paired nucleotide within the duplex region, from the 5′-end; and Y represents 2′-F modification. The sense strand may additionally contain XXX motif or ZZZ motifs as wing modifications at the opposite end of the duplex region; and XXX and ZZZ each independently represents a 2′-OMe modification or 2′-F modification.

[0348] In some embodiments the antisense strand may contain Y′Y′Y′ motif occurring at positions 11, 12, 13 of the strand, the count starting from the first nucleotide from the 5′-end, or optionally, the count starting at the first paired nucleotide within the duplex region, from the 5′-end; and Y′ represents 2′-O-methyl modification. The antisense strand may additionally contain X′X′X′ motif or Z′Z′Z′ motifs as wing modifications at the opposite end of the duplex region; and X′X′X′ and Z′Z′Z′ each independently represents a 2′-OMe modification or 2′-F modification.

[0349] The sense strand represented by any one of the above formulas (Ia), (Ib), (Ic), and (Id) forms a duplex with an antisense strand being represented by any one of formulas (IIa), (IIb), (IIc), and (IId), respectively.

[0350] Accordingly, the dsRNAi agents for use in the methods of the invention may comprise a sense strand and an antisense strand, each strand having 14 to 30 nucleotides, the iRNA duplex represented b formula (III):

(III)
sense:
5′ nₚ-Nₐ-(X X X)ᵢ-N_{b}-Y Y Y-N_{b}-
(ZZZ)ⱼ-Nₐ-n_{q} 3′
antisense:
3′ nₚ′-Nₐ′-(X′X′X′)ₖ-N_{b}′-Y′Y′Y′-N_{b}′-
(Z′Z′Z′)ₗ-Nₐ′-n_{q}′ 5′

[0351] wherein:
[0352] i, j, k, and 1 are each independently 0 or 1;
[0353] p, p′, q, and q′ are each independently 0-6;
[0354] each Nₐ and Nₐ′ independently represents an oligonucleotide sequence comprising 0-25 modified nucleotides, each sequence comprising at least two differently modified nucleotides;
[0355] each N_{b} and N_{b}′ independently represents an oligonucleotide sequence comprising 0-10 modified nucleotides;
[0356] wherein each nₚ′, nₚ, n_{q}′, and n_{q}, each of which may or may not be present, independently represents an overhang nucleotide; and
[0357] XXX, YYY, ZZZ, X′X′X′, Y′Y′Y′, and Z′Z′Z′ each independently represent one motif of three identical modifications on three consecutive nucleotides.

[0358] In one embodiment, i is 0 and j is 0; or i is 1 and j is 0; or i is 0 and j is 1; or both i and j are 0; or both i and j are 1. In another embodiment, k is 0 and 1 is 0; or k is 1 and 1 is 0; k is 0 and 1 is 1; or both k and 1 are 0; or both k and 1 are 1.

[0359] Exemplary combinations of the sense strand and antisense strand forming an iRNA duplex include the formulas below:

(IIIa)
5′ nₚ-Nₐ-Y Y Y-Nₐ-n_{q} 3′
3′ nₚ′-Nₐ′-Y′Y′Y′-Nₐ′n_{q}′ 5′
(IIIb)
5′ nₚ-Nₐ-Y Y Y-N_{b}-ZZZ-Nₐ-n_{q} 3′
3′ nₚ′-Nₐ′-Y′Y′Y′-N_{b}′-Z′Z′Z′-Nₐ′n_{q}′ 5′
(IIIc)
5′ nₚ-Nₐ-X X X-N_{b}-Y Y Y-Nₐ-n_{q} 3′
3′ nₚ′-Nₐ′-X′X′X′-N_{b}′-Y′Y′Y′-Nₐ′-n_{q}′ 5′
(IIId)
5′ nₚ-Nₐ-X X X-N_{b}-Y Y Y-N_{b}-ZZZ-Nₐ-n_{q} 3′
3′ nₚ′-Nₐ′-X′X′X′-ND′-Y′Y′Y′-N_{b}′-Z′Z′Z′-Nₐ-n_{q}′ 5′

[0360] When the dsRNAi agent is represented by formula (IIIa), each Nₐ independently represents an oligonucleotide sequence comprising 2-20, 2-15, or 2-10 modified nucleotides.

[0361] When the dsRNAi agent is represented by formula (IIIb), each N_{b} independently represents an oligonucleotide sequence comprising 1-10, 1-7, 1-5, or 1-4 modified nucleotides. Each Nₐ independently represents an oligonucleotide sequence comprising 2-20, 2-15, or 2-10 modified nucleotides.

[0362] When the dsRNAi agent is represented as formula (IIIc), each N_{b}, N_{b}′ independently represents an oligonucleotide sequence comprising 0-10, 0-7, 0-10, 0-7, 0-5, 0-4, 0-2, or 0 modified nucleotides. Each Nₐ independently represents an oligonucleotide sequence comprising 2-20, 2-15, or 2-10 modified nucleotides.

[0363] When the dsRNAi agent is represented as formula (IIId), each N_{b}, N_{b}′ independently represents an oligonucleotide sequence comprising 0-10, 0-7, 0-10, 0-7, 0-5, 0-4, 0-2, or 0 modified nucleotides. Each Nₐ, Nₐ′ independently represents an oligonucleotide sequence comprising 2-20, 2-15, or 2-10 modified nucleotides. Each of Nₐ, Nₐ′, N_{b}, and N_{b}′ independently comprises modifications of alternating pattern.

[0364] Each of X, Y, and Z in formulas (III), (IIIa), (IIIb), (IIIc), and (IIId) may be the same or different from each other.

[0365] When the dsRNAi agent is represented by formula (III), (IIIa), (IIIb), (IIIc), and (IIId), at least one of the Y nucleotides may form a base pair with one of the Y′ nucleotides. Alternatively, at least two of the Y nucleotides form base pairs with the corresponding Y′ nucleotides; or all three of the Y nucleotides all form base pairs with the corresponding Y′ nucleotides.

[0366] When the dsRNAi agent is represented by formula (IIIb) or (IIId), at least one of the Z nucleotides may form a base pair with one of the Z′ nucleotides. Alternatively, at least two of the Z nucleotides form base pairs with the corresponding Z′ nucleotides; or all three of the Z nucleotides all form base pairs with the corresponding Z′ nucleotides.

[0367] When the dsRNAi agent is represented as formula (IIIc) or (IIId), at least one of the X nucleotides may form a base pair with one of the X′ nucleotides. Alternatively, at least two of the X nucleotides form base pairs with the corresponding X′ nucleotides; or all three of the X nucleotides all form base pairs with the corresponding X′ nucleotides.

[0368] In certain embodiments, the modification on the Y nucleotide is different than the modification on the Y′ nucleotide, the modification on the Z nucleotide is different than the modification on the Z′ nucleotide, or the modification on the X nucleotide is different than the modification on the X′ nucleotide.

[0369] In certain embodiments, when the dsRNAi agent is represented by formula (IIId), the Nₐ modifications are 2′-O-methyl or 2′-fluoro modifications. In other embodiments, when the RNAi agent is represented by formula (IIId), the Nₐ modifications are 2′-O-methyl or 2′-fluoro modifications and nₚ′>0 and at least one nₚ′ is linked to a neighboring nucleotide a via phosphorothioate linkage. In yet other embodiments, when the RNAi agent is represented by formula (IIId), the Nₐ modifications are 2′-O-methyl or 2′-fluoro modifications, nₚ′>0 and at least one nₚ′ is linked to a neighboring nucleotide via phosphorothioate linkage, and the sense strand is conjugated to one or more GalNAc derivatives attached through a bivalent or trivalent branched linker (described below). In other embodiments, when the RNAi agent is represented by formula (IIId), the Nₐ modifications are 2′-O-methyl or 2′-fluoro modifications, nₚ′>0 and at least one nₚ′ is linked to a neighboring nucleotide via phosphorothioate linkage, the sense strand comprises at least one phosphorothioate linkage, and the sense strand is conjugated to one or more GalNAc derivatives attached through a bivalent or trivalent branched linker.

[0370] In some embodiments, when the dsRNAi agent is represented by formula (IIIa), the Nₐ modifications are 2′-O-methyl or 2′-fluoro modifications, nₚ′>0 and at least one nₚ′ is linked to a neighboring nucleotide via phosphorothioate linkage, the sense strand comprises at least one phosphorothioate linkage, and the sense strand is conjugated to one or more GalNAc derivatives attached through a bivalent or trivalent branched linker.

[0371] In some embodiments, the dsRNAi agent is a multimer containing at least two duplexes represented by formula (III), (IIIa), (IIIb), (IIIc), and (IIId), wherein the duplexes are connected by a linker. The linker can be cleavable or non-cleavable. Optionally, the multimer further comprises a ligand. Each of the duplexes can target the same gene or two different genes; or each of the duplexes can target same gene at two different target sites.

[0372] In some embodiments, the dsRNAi agent is a multimer containing three, four, five, six, or more duplexes represented by formula (III), (IIIa), (IIIb), (IIIc), and (IIId), wherein the duplexes are connected by a linker. The linker can be cleavable or non-cleavable. Optionally, the multimer further comprises a ligand. Each of the duplexes can target the same gene or two different genes; or each of the duplexes can target same gene at two different target sites.

[0373] In one embodiment, two dsRNAi agents represented by at least one of formulas (III), (IIIa), (IIIb), (IIIc), and (IIId) are linked to each other at the 5′ end, and one or both of the 3′ ends, and are optionally conjugated to a ligand. Each of the agents can target the same gene or two different genes; or each of the agents can target same gene at two different target sites.

[0374] In certain embodiments, an RNAi agent of the invention may contain a low number of nucleotides containing a 2′-fluoro modification, e.g., 10 or fewer nucleotides with 2′-fluoro modification. For example, the RNAi agent may contain 10, 9, 8, 7, 6, 5, 4, 3, 2, 1 or 0 nucleotides with a 2′-fluoro modification. In a specific embodiment, the RNAi agent of the invention contains 10 nucleotides with a 2′-fluoro modification, e.g., 4 nucleotides with a 2′-fluoro modification in the sense strand and 6 nucleotides with a 2′-fluoro modification in the antisense strand. In another specific embodiment, the RNAi agent of the invention contains 6 nucleotides with a 2′-fluoro modification, e.g., 4 nucleotides with a 2′-fluoro modification in the sense strand and 2 nucleotides with a 2′-fluoro modification in the antisense strand.

[0375] In other embodiments, an RNAi agent of the invention may contain an ultra low number of nucleotides containing a 2′-fluoro modification, e.g., 2 or fewer nucleotides containing a 2′-fluoro modification. For example, the RNAi agent may contain 2, 1 of 0 nucleotides with a 2′-fluoro modification. In a specific embodiment, the RNAi agent may contain 2 nucleotides with a 2′-fluoro modification, e.g., 0 nucleotides with a 2-fluoro modification in the sense strand and 2 nucleotides with a 2′-fluoro modification in the antisense strand.

[0376] Various publications describe multimeric iRNAs that can be used in the methods of the invention. Such publications include WO2007/091269, U.S. Pat. No. 7,858,769, WO2010/141511, WO2007/117686, WO2009/014887, and WO2011/031520 the entire contents of each of which are hereby incorporated herein by reference.

[0377] In certain embodiments, the compositions and methods of the disclosure include a vinyl phosphonate (VP) modification of an RNAi agent as described herein. In exemplary embodiments, a 5′ vinyl phosphonate modified nucleotide of the disclosure has the structure:

[chemical structure]

wherein X is O or S;
[0378] R is hydrogen, hydroxy, fluoro, or C₁₋₂₀alkoxy (e.g., methoxy or n-hexadecyloxy);
[0379] R^{5′} is ═C(H)—P(O)(OH)₂ and the double bond between the C5′ carbon and R^{5′} is in the E or Z orientation (e.g., E orientation); and
[0380] B is a nucleobase or a modified nucleobase, optionally where B is adenine, guanine, cytosine, thymine, or uracil.

[0381] A vinyl phosphonate of the instant disclosure may be attached to either the antisense or the sense strand of a dsRNA of the disclosure. In certain embodiments, a vinyl phosphonate of the instant disclosure is attached to the antisense strand of a dsRNA, optionally at the 5′ end of the antisense strand of the dsRNA.

[0382] Vinyl phosphonate modifications are also contemplated for the compositions and methods of the instant disclosure. An exemplary vinyl phosphonate structure includes the preceding structure, where R5′ is ═C(H)—OP(O)(OH)2 and the double bond between the C5′ carbon and R5′ is in the E or Z orientation (e.g., E orientation).

[0383] As described in more detail below, the iRNA that contains conjugations of one or more carbohydrate moieties to an iRNA can optimize one or more properties of the iRNA. In many cases, the carbohydrate moiety will be attached to a modified subunit of the iRNA. For example, the ribose sugar of one or more ribonucleotide subunits of a iRNA can be replaced with another moiety, e.g., a non-carbohydrate (such as, cyclic) carrier to which is attached a carbohydrate ligand. A ribonucleotide subunit in which the ribose sugar of the subunit has been so replaced is referred to herein as a ribose replacement modification subunit (RRMS). A cyclic carrier may be a carbocyclic ring system, i.e., all ring atoms are carbon atoms, or a heterocyclic ring system, i.e., one or more ring atoms may be a heteroatom, e.g., nitrogen, oxygen, sulfur. The cyclic carrier may be a monocyclic ring system, or may contain two or more rings, e.g. fused rings. The cyclic carrier may be a fully saturated ring system, or it may contain one or more double bonds.

[0384] The ligand may be attached to the polynucleotide via a carrier. The carriers include (i) at least one “backbone attachment point,” such as, two “backbone attachment points” and (ii) at least one “tethering attachment point.” A “backbone attachment point” as used herein refers to a functional group, e.g. a hydroxyl group, or generally, a bond available for, and that is suitable for incorporation of the carrier into the backbone, e.g., the phosphate, or modified phosphate, e.g., sulfur containing, backbone, of a ribonucleic acid. A “tethering attachment point” (TAP) in some embodiments refers to a constituent ring atom of the cyclic carrier, e.g., a carbon atom or a heteroatom (distinct from an atom which provides a backbone attachment point), that connects a selected moiety. The moiety can be, e.g., a carbohydrate, e.g. monosaccharide, disaccharide, trisaccharide, tetrasaccharide, oligosaccharide, or polysaccharide. Optionally, the selected moiety is connected by an intervening tether to the cyclic carrier. Thus, the cyclic carrier will often include a functional group, e.g., an amino group, or generally, provide a bond, that is suitable for incorporation or tethering of another chemical entity, e.g., a ligand to the constituent ring.

[0385] The iRNA may be conjugated to a ligand via a carrier, wherein the carrier can be cyclic group or acyclic group. In one embodiment, the cyclic group is selected from pyrrolidinyl, pyrazolinyl, pyrazolidinyl, imidazolinyl, imidazolidinyl, piperidinyl, piperazinyl, [1,3]dioxolane, oxazolidinyl, isoxazolidinyl, morpholinyl, thiazolidinyl, isothiazolidinyl, quinoxalinyl, pyridazinonyl, tetrahydrofuryl, and decalin. In one embodiment, the acyclic group is a serinol backbone or diethanolamine backbone.

### a. Thermally Destabilizing Modifications

[0386] In certain embodiments, a dsRNA molecule can be optimized for RNA interference by incorporating thermally destabilizing modifications in the seed region of the antisense strand. As used herein “seed region” means at positions 2-9 of the 5′-end of the referenced strand. For example, thermally destabilizing modifications can be incorporated in the seed region of the antisense strand to reduce or inhibit off-target gene silencing.

[0387] The term “thermally destabilizing modification(s)” includes modification(s) that would result with a dsRNA with a lower overall melting temperature (Tₘ) than the Tₘ of the dsRNA without having such modification(s). For example, the thermally destabilizing modification(s) can decrease the Tₘ of the dsRNA by 1-4° C., such as one, two, three or four degrees Celcius. And, the term “thermally destabilizing nucleotide” refers to a nucleotide containing one or more thermally destabilizing modifications.

[0388] It has been discovered that dsRNAs with an antisense strand comprising at least one thermally destabilizing modification of the duplex within the first 9 nucleotide positions, counting from the 5′ end, of the antisense strand have reduced off-target gene silencing activity. Accordingly, in some embodiments, the antisense strand comprises at least one (e.g., one, two, three, four, five or more) thermally destabilizing modification of the duplex within the first 9 nucleotide positions of the 5′ region of the antisense strand. In some embodiments, one or more thermally destabilizing modification(s) of the duplex is/are located in positions 2-9, such as, positions 4-8, from the 5′-end of the antisense strand. In some further embodiments, the thermally destabilizing modification(s) of the duplex is/are located at position 6, 7 or 8 from the 5′-end of the antisense strand. In still some further embodiments, the thermally destabilizing modification of the duplex is located at position 7 from the 5′-end of the antisense strand. In some embodiments, the thermally destabilizing modification of the duplex is located at position 2, 3, 4, 5 or 9 from the 5′-end of the antisense strand.

[0389] An iRNA agent comprises a sense strand and an antisense strand, each strand having 14 to 40 nucleotides. The RNAi agent may be represented by formula (L):

[chemical structure]

In formula (L), B1, B2, B3, B1′, B2′, B3′, and B4′ each are independently a nucleotide containing a modification selected from the group consisting of 2′-O-alkyl, 2′-substituted alkoxy, 2′-substituted alkyl, 2′-halo, ENA, and BNA/LNA. In one embodiment, B1, B2, B3, B1′, B2′, B3′, and B4′ each contain 2′-OMe modifications. In one embodiment, B1, B2, B3, B1′, B2′, B3′, and B4′ each contain 2′-OMe or 2′-F modifications. In one embodiment, at least one of B1, B2, B3, B1′, B2′, B3′, and B4′ contain 2′-O—N-methylacetamido (2′-O-NMA, 2′O—CH2C(O)N(Me)H) modification.

[0390] C1 is a thermally destabilizing nucleotide placed at a site opposite to the seed region of the antisense strand (i.e., at positions 2-8 of the 5′-end of the antisense strand). For example, C1 is at a position of the sense strand that pairs with a nucleotide at positions 2-8 of the 5′-end of the antisense strand. In one example, C1 is at position 15 from the 5′-end of the sense strand. C1 nucleotide bears the thermally destabilizing modification which can include abasic modification; mismatch with the opposing nucleotide in the duplex; and sugar modification such as 2′-deoxy modification or acyclic nucleotide e.g., unlocked nucleic acids (UNA) or glycerol nucleic acid (GNA). In one embodiment, C1 has thermally destabilizing modification selected from the group consisting of: i) mismatch with the opposing nucleotide in the antisense strand; ii) abasic modification selected from the group consisting of:

[chemical structure]

and iii) sugar modification selected from the group consisting of:

[chemical structure]

wherein B is a modified or unmodified nucleobase, R¹ and R² independently are H, halogen, OR₃, or alkyl; and R₃ is H, alkyl, cycloalkyl, aryl, aralkyl, heteroaryl or sugar. In one embodiment, the thermally destabilizing modification in C1 is a mismatch selected from the group consisting of G:G, G:A, G:U, G:T, A:A, A:C, C:C, C:U, C:T, U:U, T:T, and U:T; and optionally, at least one nucleobase in the mismatch pair is a 2′-deoxy nucleobase. In one example, the thermally destabilizing modification in C1 is GNA or

[chemical structure]

[0391] T1, T1′, T2′, and T3′ each independently represent a nucleotide comprising a modification providing the nucleotide a steric bulk that is less or equal to the steric bulk of a 2′-OMe modification. A steric bulk refers to the sum of steric effects of a modification. Methods for determining steric effects of a modification of a nucleotide are known to one skilled in the art. The modification can be at the 2′ position of a ribose sugar of the nucleotide, or a modification to a non-ribose nucleotide, acyclic nucleotide, or the backbone of the nucleotide that is similar or equivalent to the 2′ position of the ribose sugar, and provides the nucleotide a steric bulk that is less than or equal to the steric bulk of a 2′-OMe modification. For example, T1, T1′, T2′, and T3′ are each independently selected from DNA, RNA, LNA, 2′-F, and 2′-F-5′-methyl. In one embodiment, T1 is DNA. In one embodiment, T1′ is DNA, RNA or LNA. In one embodiment, T2′ is DNA or RNA. In one embodiment, T3′ is DNA or RNA.
[0392] n¹, n³, and q¹ are independently 4 to 15 nucleotides in length.
[0393] n⁵, q³, and q⁷ are independently 1-6 nucleotide(s) in length.
[0394] n⁴, q², and q⁶ are independently 1-3 nucleotide(s) in length; alternatively, n⁴ is 0.
[0395] q⁵ is independently 0-10 nucleotide(s) in length.
[0396] n² and q⁴ are independently 0-3 nucleotide(s) in length.

[0397] Alternatively, n⁴ is 0-3 nucleotide(s) in length.

[0398] In one embodiment, n⁴ can be 0. In one example, n⁴ is 0, and q² and q⁶ are 1. In another example, n⁴ is 0, and q² and q⁶ are 1, with two phosphorothioate internucleotide linkage modifications within position 1-5 of the sense strand (counting from the 5′-end of the sense strand), and two phosphorothioate internucleotide linkage modifications at positions 1 and 2 and two phosphorothioate internucleotide linkage modifications within positions 18-23 of the antisense strand (counting from the 5′-end of the antisense strand).

[0399] In one embodiment, n⁴, q², and q⁶ are each 1.

[0400] In one embodiment, n², n⁴, q², q⁴, and q⁶ are each 1.

[0401] In one embodiment, C1 is at position 14-17 of the 5′-end of the sense strand, when the sense strand is 19-22 nucleotides in length, and n⁴ is 1. In one embodiment, C1 is at position 15 of the 5′-end of the sense strand

[0402] In one embodiment, T3′ starts at position 2 from the 5′ end of the antisense strand. In one example, T3′ is at position 2 from the 5′ end of the antisense strand and q⁶ is equal to 1.

[0403] In one embodiment, T1′ starts at position 14 from the 5′ end of the antisense strand. In one example, T1′ is at position 14 from the 5′ end of the antisense strand and q² is equal to 1.

[0404] In an exemplary embodiment, T3′ starts from position 2 from the 5′ end of the antisense strand and T1′ starts from position 14 from the 5′ end of the antisense strand. In one example, T3′ starts from position 2 from the 5′ end of the antisense strand and q⁶ is equal to 1 and T1′ starts from position 14 from the 5′ end of the antisense strand and q² is equal to 1.

[0405] In one embodiment, T1′ and T3′ are separated by 11 nucleotides in length (i.e. not counting the T1′ and T3′ nucleotides).

[0406] In one embodiment, T1′ is at position 14 from the 5′ end of the antisense strand. In one example, T1′ is at position 14 from the 5′ end of the antisense strand and q² is equal to 1, and the modification at the 2′ position or positions in a non-ribose, acyclic or backbone that provide less steric bulk than a 2′-OMe ribose.

[0407] In one embodiment, T3′ is at position 2 from the 5′ end of the antisense strand. In one example, T3′ is at position 2 from the 5′ end of the antisense strand and q⁶ is equal to 1, and the modification at the 2′ position or positions in a non-ribose, acyclic or backbone that provide less than or equal to steric bulk than a 2′-OMe ribose.

[0408] In one embodiment, T1 is at the cleavage site of the sense strand. In one example, T1 is at position 11 from the 5′ end of the sense strand, when the sense strand is 19-22 nucleotides in length, and n² is 1. In an exemplary embodiment, T1 is at the cleavage site of the sense strand at position 11 from the 5′ end of the sense strand, when the sense strand is 19-22 nucleotides in length, and n² is 1, In one embodiment, T2′ starts at position 6 from the 5′ end of the antisense strand. In one example, T2′ is at positions 6-10 from the 5′ end of the antisense strand, and q⁴ is 1.

[0409] In an exemplary embodiment, T1 is at the cleavage site of the sense strand, for instance, at position 11 from the 5′ end of the sense strand, when the sense strand is 19-22 nucleotides in length, and n² is 1; T1′ is at position 14 from the 5′ end of the antisense strand, and q² is equal to 1, and the modification to T1′ is at the 2′ position of a ribose sugar or at positions in a non-ribose, acyclic or backbone that provide less steric bulk than a 2′-OMe ribose; T2′ is at positions 6-10 from the 5′ end of the antisense strand, and q⁴ is 1; and T3′ is at position 2 from the 5′ end of the antisense strand, and q⁶ is equal to 1, and the modification to T3′ is at the 2′ position or at positions in a non-ribose, acyclic or backbone that provide less than or equal to steric bulk than a 2′-OMe ribose.

[0410] In one embodiment, T2′ starts at position 8 from the 5′ end of the antisense strand. In one example, T2′ starts at position 8 from the 5′ end of the antisense strand, and q⁴ is 2.

[0411] In one embodiment, T2′ starts at position 9 from the 5′ end of the antisense strand. In one example, T2′ is at position 9 from the 5′ end of the antisense strand, and q⁴ is 1.

[0412] In one embodiment, B1′ is 2′-OMe or 2′-F, q¹ is 9, T1′ is 2′-F, q² is 1, B2′ is 2′-OMe or 2′-F, q³ is 4, T2′ is 2′-F, q⁴ is 1, B3′ is 2′-OMe or 2′-F, q⁵ is 6, T3′ is 2′-F, q⁶ is 1, B4′ is 2′-OMe, and q⁷ is 1; with two phosphorothioate internucleotide linkage modifications within positions 1-5 of the sense strand (counting from the 5′-end of the sense strand), and two phosphorothioate internucleotide linkage modifications at positions 1 and 2 and two phosphorothioate internucleotide linkage modifications within positions 18-23 of the antisense strand (counting from the 5′-end of the antisense strand).

[0413] In one embodiment, n⁴ is 0, B3 is 2′-OMe, n⁵ is 3, B1′ is 2′-OMe or 2′-F, q¹ is 9, T1′ is 2′-F, q² is 1, B2′ is 2′-OMe or 2′-F, q³ is 4, T2′ is 2′-F, q⁴ is 1, B3′ is 2′-OMe or 2′-F, q⁵ is 6, T3′ is 2′-F, q⁶ is 1, B4′ is 2′-OMe, and q⁷ is 1; with two phosphorothioate internucleotide linkage modifications within positions 1-5 of the sense strand (counting from the 5′-end of the sense strand), and two phosphorothioate internucleotide linkage modifications at positions 1 and 2 and two phosphorothioate internucleotide linkage modifications within positions 18-23 of the antisense strand (counting from the 5′-end of the antisense strand).

[0414] In one embodiment, B1 is 2′-OMe or 2′-F, n¹ is 8, T1 is 2′F, n² is 3, B2 is 2′-OMe, n³ is 7, n⁴ is 0, B3 is 2′OMe, n⁵ is 3, B1′ is 2′-OMe or 2′-F, q¹ is 9, T1′ is 2′-F, q² is 1, B2′ is 2′-OMe or 2′-F, q³ is 4, T2′ is 2′-F, q⁴ is 2, B3′ is 2′-OMe or 2′-F, q⁵ is 5, T3′ is 2′-F, q⁶ is 1, B4′ is 2′-OMe, and q⁷ is 1.

[0415] In one embodiment, B1 is 2′-OMe or 2′-F, n¹ is 8, T1 is 2′F, n² is 3, B2 is 2′-OMe, n³ is 7, n⁴ is 0, B3 is 2′-OMe, n⁵ is 3, B1′ is 2′-OMe or 2′-F, q¹ is 9, T1′ is 2′-F, q² is 1, B2′ is 2′-OMe or 2′-F, q³ is 4, T2′ is 2′-F, q⁴ is 2, B3′ is 2′-OMe or 2′-F, q⁵ is 5, T3′ is 2′-F, q⁶ is 1, B4′ is 2′-OMe, and q⁷ is 1; with two phosphorothioate internucleotide linkage modifications within positions 1-5 of the sense strand (counting from the 5′-end of the sense strand), and two phosphorothioate internucleotide linkage modifications at positions 1 and 2 and two phosphorothioate internucleotide linkage modifications within positions 18-23 of the antisense strand (counting from the 5′-end of the antisense strand).

[0416] In one embodiment, B1 is 2′-OMe or 2′-F, n¹ is 6, T1 is 2′F, n² is 3, B2 is 2′-OMe, n³ is 7, n⁴ is 0, B3 is 2′OMe, n⁵ is 3, B1′ is 2′-OMe or 2′-F, q¹ is 7, T1′ is 2′-F, q² is 1, B2′ is 2′-OMe or 2′-F, q³ is 4, T2′ is 2′-F, q⁴ is 2, B3′ is 2′-OMe or 2′-F, q⁵ is 5, T3′ is 2′-F, q⁶ is 1, B4′ is 2′-OMe, and q⁷ is 1.

[0417] In one embodiment, B1 is 2′-OMe or 2′-F, n¹ is 6, T1 is 2′F, n² is 3, B2 is 2′-OMe, n³ is 7, n⁴ is 0, B3 is 2′-OMe, n⁵ is 3, B1′ is 2′-OMe or 2′-F, q¹ is 7, T1′ is 2′-F, q² is 1, B2′ is 2′-OMe or 2′-F, q³ is 4, T2′ is 2′-F, q⁴ is 2, B3′ is 2′-OMe or 2′-F, q⁵ is 5, T3′ is 2′-F, q⁶ is 1, B4′ is 2′-OMe, and q⁷ is 1; with two phosphorothioate internucleotide linkage modifications within positions 1-5 of the sense strand (counting from the 5′-end of the sense strand), and two phosphorothioate internucleotide linkage modifications at positions 1 and 2 and two phosphorothioate internucleotide linkage modifications within positions 18-23 of the antisense strand (counting from the 5′-end of the antisense strand).

[0418] In one embodiment, B1 is 2′-OMe or 2′-F, n² is 8, T1 is 2′F, n² is 3, B2 is 2′-OMe, n³ is 7, n⁴ is 0, B3 is 2′OMe, n⁵ is 3, B1′ is 2′-OMe or 2′-F, q¹ is 9, T1′ is 2′-F, q² is 1, B2′ is 2′-OMe or 2′-F, q³ is 4, T2′ is 2′-F, q⁴ is 1, B3′ is 2′-OMe or 2′-F, q⁵ is 6, T3′ is 2′-F, q⁶ is 1, B4′ is 2′-OMe, and q⁷ is 1.

[0419] In one embodiment, B1 is 2′-OMe or 2′-F, n¹ is 8, T1 is 2′F, n² is 3, B2 is 2′-OMe, n³ is 7, n⁴ is 0, B3 is 2′-OMe, n⁵ is 3, B1′ is 2′-OMe or 2′-F, q¹ is 9, T1′ is 2′-F, q² is 1, B2′ is 2′-OMe or 2′-F, q³ is 4, T2′ is 2′-F, q⁴ is 1, B3′ is 2′-OMe or 2′-F, q⁵ is 6, T3′ is 2′-F, q⁶ is 1, B4′ is 2′-OMe, and q⁷ is 1; with two phosphorothioate internucleotide linkage modifications within positions 1-5 of the sense strand (counting from the 5′-end of the sense strand), and two phosphorothioate internucleotide linkage modifications at positions 1 and 2 and two phosphorothioate internucleotide linkage modifications within positions 18-23 of the antisense strand (counting from the 5′-end of the antisense strand).

[0420] In one embodiment, B1 is 2′-OMe or 2′-F, n¹ is 8, T1 is 2′F, n² is 3, B2 is 2′-OMe, n³ is 7, n⁴ is 0, B3 is 2′OMe, n⁵ is 3, B1′ is 2′-OMe or 2′-F, q¹ is 9, T1′ is 2′-F, q² is 1, B2′ is 2′-OMe or 2′-F, q³ is 5, T2′ is 2′-F, q⁴ is 1, B3′ is 2′-OMe or 2′-F, q⁵ is 5, T3′ is 2′-F, q⁶ is 1, B4′ is 2′-OMe, and q⁷ is 1; optionally with at least 2 additional TT at the 3′-end of the antisense strand.

[0421] In one embodiment, B1 is 2′-OMe or 2′-F, n¹ is 8, T1 is 2′F, n² is 3, B2 is 2′-OMe, n³ is 7, n⁴ is 0, B3 is 2′-OMe, n⁵ is 3, B1′ is 2′-OMe or 2′-F, q¹ is 9, T1′ is 2′-F, q² is 1, B2′ is 2′-OMe or 2′-F, q³ is 5, T2′ is 2′-F, q⁴ is 1, B3′ is 2′-OMe or 2′-F, q⁵ is 5, T3′ is 2′-F, q⁶ is 1, B4′ is 2′-OMe, and q⁷ is 1; optionally with at least 2 additional TT at the 3′-end of the antisense strand; with two phosphorothioate internucleotide linkage modifications within positions 1-5 of the sense strand (counting from the 5′-end of the sense strand), and two phosphorothioate internucleotide linkage modifications at positions 1 and 2 and two phosphorothioate internucleotide linkage modifications within positions 18-23 of the antisense strand (counting from the 5′-end of the antisense strand).

[0422] In one embodiment, B1 is 2′-OMe or 2′-F, n¹ is 8, T1 is 2′F, n² is 3, B2 is 2′-OMe, n³ is 7, n⁴ is 0, B3 is 2′-OMe, n⁵ is 3, B1′ is 2′-OMe or 2′-F, q¹ is 9, T1′ is 2′-F, q² is 1, B2′ is 2′-OMe or 2′-F, q³ is 4, q⁴ is 0, B3′ is 2′-OMe or 2′-F, q⁵ is 7, T3′ is 2′-F, q⁶ is 1, B4′ is 2′-OMe, and q⁷ is 1.

[0423] In one embodiment, B1 is 2′-OMe or 2′-F, n¹ is 8, T1 is 2′F, n² is 3, B2 is 2′-OMe, n³ is 7, n⁴ is 0, B3 is 2′-OMe, n⁵ is 3, B1′ is 2′-OMe or 2′-F, q¹ is 9, T1′ is 2′-F, q² is 1, B2′ is 2′-OMe or 2′-F, q³ is 4, q⁴ is 0, B3′ is 2′-OMe or 2′-F, q⁵ is 7, T3′ is 2′-F, q⁶ is 1, B4′ is 2′-OMe, and q⁷ is 1; with two phosphorothioate internucleotide linkage modifications within positions 1-5 of the sense strand (counting from the 5′-end), and two phosphorothioate internucleotide linkage modifications at positions 1 and 2 and two phosphorothioate internucleotide linkage modifications within positions 18-23 of the antisense strand (counting from the 5′-end).

[0424] In one embodiment, B1 is 2′-OMe or 2′-F, n¹ is 8, T1 is 2′F, n² is 3, B2 is 2′-OMe, n³ is 7, n⁴ is 0, B3 is 2′OMe, n⁵ is 3, B1′ is 2′-OMe or 2′-F, q¹ is 9, T1′ is 2′-F, q² is 1, B2′ is 2′-OMe or 2′-F, q³ is 4, T2′ is 2′-F, q⁴ is 2, B3′ is 2′-OMe or 2′-F, q⁵ is 5, T3′ is 2′-F, q⁶ is 1, B4′ is 2′-F, and q⁷ is 1.

[0425] In one embodiment, B1 is 2′-OMe or 2′-F, n¹ is 8, T1 is 2′F, n² is 3, B2 is 2′-OMe, n³ is 7, n⁴ is 0, B3 is 2′-OMe, n⁵ is 3, B1′ is 2′-OMe or 2′-F, q¹ is 9, T1′ is 2′-F, q² is 1, B2′ is 2′-OMe or 2′-F, q³ is 4, T2′ is 2′-F, q⁴ is 2, B3′ is 2′-OMe or 2′-F, q⁵ is 5, T3′ is 2′-F, q⁶ is 1, B4′ is 2′-F, and q⁷ is 1; with two phosphorothioate internucleotide linkage modifications within positions 1-5 of the sense strand (counting from the 5′-end of the sense strand), and two phosphorothioate internucleotide linkage modifications at positions 1 and 2 and two phosphorothioate internucleotide linkage modifications within positions 18-23 of the antisense strand (counting from the 5′-end of the antisense strand).

[0426] In one embodiment, B1 is 2′-OMe or 2′-F, n¹ is 8, T1 is 2′F, n² is 3, B2 is 2′-OMe, n³ is 7, n⁴ is 0, B3 is 2′-OMe, n⁵ is 3, B1′ is 2′-OMe or 2′-F, q¹ is 9, T1′ is 2′-F, q² is 1, B2′ is 2′-OMe or 2′-F, q³ is 4, q⁴ is 0, B3′ is 2′-OMe or 2′-F, q⁵ is 7, T3′ is 2′-F, q⁶ is 1, B4′ is 2′-F, and q⁷ is 1.

[0427] In one embodiment, B1 is 2′-OMe or 2′-F, n¹ is 8, T1 is 2′F, n² is 3, B2 is 2′-OMe, n³ is 7, n⁴ is 0, B3 is 2′-OMe, n⁵ is 3, B1′ is 2′-OMe or 2′-F, q¹ is 9, T1′ is 2′-F, q² is 1, B2′ is 2′-OMe or 2′-F, q³ is 4, q⁴ is 0, B3′ is 2′-OMe or 2′-F, q⁵ is 7, T3′ is 2′-F, q⁶ is 1, B4′ is 2′-F, and q⁷ is 1; with two phosphorothioate internucleotide linkage modifications within positions 1-5 of the sense strand (counting from the 5′-end of the sense strand), and two phosphorothioate internucleotide linkage modifications at positions 1 and 2 and two phosphorothioate internucleotide linkage modifications within positions 18-23 of the antisense strand (counting from the 5′-end of the antisense strand).

[0428] The RNAi agent can comprise a phosphorus-containing group at the 5′-end of the sense strand or antisense strand. The 5′-end phosphorus-containing group can be 5′-end phosphate (5′-P), 5′-end phosphorothioate (5′-PS), 5′-end phosphorodithioate (5′-PS₂), 5′-end vinylphosphonate (5′-VP), 5′-end methylphosphonate (MePhos), or 5′-deoxy-5′-C-malonyl

[chemical structure]

When the 5′-end phosphorus-containing group is 5′-end vinylphosphonate (5′-VP), the 5′-VP can be either 5′-E-VP isomer (i.e., trans-vinylphosphonate,

[chemical structure]

5′-Z—VP isomer (i.e., cis-vinylphosphonate,

[chemical structure]

or mixtures thereof.

[0429] In one embodiment, the RNAi agent comprises a phosphorus-containing group at the 5′-end of the sense strand. In one embodiment, the RNAi agent comprises a phosphorus-containing group at the 5′-end of the antisense strand.

[0430] In one embodiment, the RNAi agent comprises a 5′-P. In one embodiment, the RNAi agent comprises a 5′-P in the antisense strand.

[0431] In one embodiment, the RNAi agent comprises a 5′-PS. In one embodiment, the RNAi agent comprises a 5′-PS in the antisense strand.

[0432] In one embodiment, the RNAi agent comprises a 5′-VP. In one embodiment, the RNAi agent comprises a 5′-VP in the antisense strand. In one embodiment, the RNAi agent comprises a 5′-E-VP in the antisense strand. In one embodiment, the RNAi agent comprises a 5′-Z—VP in the antisense strand.

[0433] In one embodiment, the RNAi agent comprises a 5′-PS₂. In one embodiment, the RNAi agent comprises a 5′-PS₂ in the antisense strand.

[0434] In one embodiment, the RNAi agent comprises a 5′-PS₂. In one embodiment, the RNAi agent comprises a 5′-deoxy-5′-C-malonyl in the antisense strand.

[0435] In one embodiment, B1 is 2′-OMe or 2′-F, n¹ is 8, T1 is 2′F, n² is 3, B2 is 2′-OMe, n³ is 7, n⁴ is 0, B3 is 2′OMe, n⁵ is 3, B1′ is 2′-OMe or 2′-F, q¹ is 9, T1′ is 2′-F, q² is 1, B2′ is 2′-OMe or 2′-F, q³ is 4, T2′ is 2′-F, q⁴ is 2, B3′ is 2′-OMe or 2′-F, q⁵ is 5, T3′ is 2′-F, q⁶ is 1, B4′ is 2′-OMe, and q⁷ is 1. The RNAi agent also comprises a 5′-PS.

[0436] In one embodiment, B1 is 2′-OMe or 2′-F, n¹ is 8, T1 is 2′F, n² is 3, B2 is 2′-OMe, n³ is 7, n⁴ is 0, B3 is 2′OMe, n⁵ is 3, B1′ is 2′-OMe or 2′-F, q¹ is 9, T1′ is 2′-F, q² is 1, B2′ is 2′-OMe or 2′-F, q³ is 4, T2′ is 2′-F, q⁴ is 2, B3′ is 2′-OMe or 2′-F, q⁵ is 5, T3′ is 2′-F, q⁶ is 1, B4′ is 2′-OMe, and q⁷ is 1. The RNAi agent also comprises a 5′-P.

[0437] In one embodiment, B1 is 2′-OMe or 2′-F, n¹ is 8, T1 is 2′F, n² is 3, B2 is 2′-OMe, n³ is 7, n⁴ is 0, B3 is 2′OMe, n⁵ is 3, B1′ is 2′-OMe or 2′-F, q¹ is 9, T1′ is 2′-F, q² is 1, B2′ is 2′-OMe or 2′-F, q³ is 4, T2′ is 2′-F, q⁴ is 2, B3′ is 2′-OMe or 2′-F, q⁵ is 5, T3′ is 2′-F, q⁶ is 1, B4′ is 2′-OMe, and q⁷ is 1. The RNAi agent also comprises a 5′-VP. The 5′-VP may be 5′-E-VP, 5′-Z—VP, or combination thereof.

[0438] In one embodiment, B1 is 2′-OMe or 2′-F, n¹ is 8, T1 is 2′F, n² is 3, B2 is 2′-OMe, n³ is 7, n⁴ is 0, B3 is 2′OMe, n⁵ is 3, B1′ is 2′-OMe or 2′-F, q¹ is 9, T1′ is 2′-F, q² is 1, B2′ is 2′-OMe or 2′-F, q³ is 4, T2′ is 2′-F, q⁴ is 2, B3′ is 2′-OMe or 2′-F, q⁵ is 5, T3′ is 2′-F, q⁶ is 1, B4′ is 2′-OMe, and q⁷ is 1. The RNAi agent also comprises a 5′-PS₂.

[0439] In one embodiment, B1 is 2′-OMe or 2′-F, n¹ is 8, T1 is 2′F, n² is 3, B2 is 2′-OMe, n³ is 7, n⁴ is 0, B3 is 2′OMe, n⁵ is 3, B1′ is 2′-OMe or 2′-F, q¹ is 9, T1′ is 2′-F, q² is 1, B2′ is 2′-OMe or 2′-F, q³ is 4, T2′ is 2′-F, q⁴ is 2, B3′ is 2′-OMe or 2′-F, q⁵ is 5, T3′ is 2′-F, q⁶ is 1, B4′ is 2′-OMe, and q⁷ is 1. The RNAi agent also comprises a 5′-deoxy-5′-C-malonyl.

[0440] In one embodiment, B1 is 2′-OMe or 2′-F, n¹ is 8, T1 is 2′F, n² is 3, B2 is 2′-OMe, n³ is 7, n⁴ is 0, B3 is 2′-OMe, n⁵ is 3, B1′ is 2′-OMe or 2′-F, q¹ is 9, T1′ is 2′-F, q² is 1, B2′ is 2′-OMe or 2′-F, q³ is 4, T2′ is 2′-F, q⁴ is 2, B3′ is 2′-OMe or 2′-F, q⁵ is 5, T3′ is 2′-F, q⁶ is 1, B4′ is 2′-OMe, and q⁷ is 1; with two phosphorothioate internucleotide linkage modifications within position 1-5 of the sense strand (counting from the 5′-end of the sense strand), and two phosphorothioate internucleotide linkage modifications at positions 1 and 2 and two phosphorothioate internucleotide linkage modifications within positions 18-23 of the antisense strand (counting from the 5′-end of the antisense strand). The RNAi agent also comprises a 5′-P.

In one embodiment, B1 is 2′-OMe or 2′-F, n¹ is 8, T1 is 2′F, n² is 3, B2 is 2′-OMe, n³ is 7, n⁴ is 0, B3 is 2′-OMe, n⁵ is 3, B1′ is 2′-OMe or 2′-F, q¹ is 9, T1′ is 2′-F, q² is 1, B2′ is 2′-OMe or 2′-F, q³ is 4, T2′ is 2′-F, q⁴ is 2, B3′ is 2′-OMe or 2′-F, q⁵ is 5, T3′ is 2′-F, q⁶ is 1, B4′ is 2′-OMe, and q⁷ is 1; with two phosphorothioate internucleotide linkage modifications within position 1-5 of the sense strand (counting from the 5′-end of the sense strand), and two phosphorothioate internucleotide linkage modifications at positions 1 and 2 and two phosphorothioate internucleotide linkage modifications within positions 18-23 of the antisense strand (counting from the 5′-end of the antisense strand). The RNAi agent also comprises a 5′-PS.

[0441] In one embodiment, B1 is 2′-OMe or 2′-F, n¹ is 8, T1 is 2′F, n² is 3, B2 is 2′-OMe, n³ is 7, n⁴ is 0, B3 is 2′-OMe, n⁵ is 3, B1′ is 2′-OMe or 2′-F, q¹ is 9, T1′ is 2′-F, q² is 1, B2′ is 2′-OMe or 2′-F, q³ is 4, T2′ is 2′-F, q⁴ is 2, B3′ is 2′-OMe or 2′-F, q⁵ is 5, T3′ is 2′-F, q⁶ is 1, B4′ is 2′-OMe, and q⁷ is 1; with two phosphorothioate internucleotide linkage modifications within position 1-5 of the sense strand (counting from the 5′-end of the sense strand), and two phosphorothioate internucleotide linkage modifications at positions 1 and 2 and two phosphorothioate internucleotide linkage modifications within positions 18-23 of the antisense strand (counting from the 5′-end of the antisense strand). The RNAi agent also comprises a 5′-VP. The 5′-VP may be 5′-E-VP, 5′-Z—VP, or combination thereof.

In one embodiment, B1 is 2′-OMe or 2′-F, n¹ is 8, T1 is 2′F, n² is 3, B2 is 2′-OMe, n³ is 7, n⁴ is 0, B3 is 2′-OMe, n⁵ is 3, B1′ is 2′-OMe or 2′-F, q¹ is 9, T1′ is 2′-F, q² is 1, B2′ is 2′-OMe or 2′-F, q³ is 4, T2′ is 2′-F, q⁴ is 2, B3′ is 2′-OMe or 2′-F, q⁵ is 5, T3′ is 2′-F, q⁶ is 1, B4′ is 2′-OMe, and q⁷ is 1; with two phosphorothioate internucleotide linkage modifications within position 1-5 of the sense strand (counting from the 5′-end of the sense strand), and two phosphorothioate internucleotide linkage modifications at positions 1 and 2 and two phosphorothioate internucleotide linkage modifications within positions 18-23 of the antisense strand (counting from the 5′-end of the antisense strand). The RNAi agent also comprises a 5′-PS₂.

[0442] In one embodiment, B1 is 2′-OMe or 2′-F, n¹ is 8, T1 is 2′F, n² is 3, B2 is 2′-OMe, n³ is 7, n⁴ is 0, B3 is 2′-OMe, n⁵ is 3, B1′ is 2′-OMe or 2′-F, q¹ is 9, T1′ is 2′-F, q² is 1, B2′ is 2′-OMe or 2′-F, q³ is 4, T2′ is 2′-F, q⁴ is 2, B3′ is 2′-OMe or 2′-F, q⁵ is 5, T3′ is 2′-F, q⁶ is 1, B4′ is 2′-OMe, and q⁷ is 1; with two phosphorothioate internucleotide linkage modifications within position 1-5 of the sense strand (counting from the 5′-end of the sense strand), and two phosphorothioate internucleotide linkage modifications at positions 1 and 2 and two phosphorothioate internucleotide linkage modifications within positions 18-23 of the antisense strand (counting from the 5′-end of the antisense strand). The RNAi agent also comprises a 5′-deoxy-5′-C-malonyl.

[0443] In one embodiment, B1 is 2′-OMe or 2′-F, n¹ is 8, T1 is 2′F, n² is 3, B2 is 2′-OMe, n³ is 7, n⁴ is 0, B3 is 2′-OMe, n⁵ is 3, B1′ is 2′-OMe or 2′-F, q¹ is 9, T1′ is 2′-F, q² is 1, B2′ is 2′-OMe or 2′-F, q³ is 4, q⁴ is 0, B3′ is 2′-OMe or 2′-F, q⁵ is 7, T3′ is 2′-F, q⁶ is 1, B4′ is 2′-OMe, and q⁷ is 1. The RNAi agent also comprises a 5′-P.

[0444] In one embodiment, B1 is 2′-OMe or 2′-F, n¹ is 8, T1 is 2′F, n² is 3, B2 is 2′-OMe, n³ is 7, n⁴ is 0, B3 is 2′-OMe, n⁵ is 3, B1′ is 2′-OMe or 2′-F, q¹ is 9, T1′ is 2′-F, q² is 1, B2′ is 2′-OMe or 2′-F, q³ is 4, q⁴ is 0, B3′ is 2′-OMe or 2′-F, q⁵ is 7, T3′ is 2′-F, q⁶ is 1, B4′ is 2′-OMe, and q⁷ is 1. The dsRNA agent also comprises a 5′-PS.

[0445] In one embodiment, B1 is 2′-OMe or 2′-F, n¹ is 8, T1 is 2′F, n² is 3, B2 is 2′-OMe, n³ is 7, n⁴ is 0, B3 is 2′-OMe, n⁵ is 3, B1′ is 2′-OMe or 2′-F, q¹ is 9, T1′ is 2′-F, q² is 1, B2′ is 2′-OMe or 2′-F, q³ is 4, q⁴ is 0, B3′ is 2′-OMe or 2′-F, q⁵ is 7, T3′ is 2′-F, q⁶ is 1, B4′ is 2′-OMe, and q⁷ is 1. The RNAi agent also comprises a 5′-VP. The 5′-VP may be 5′-E-VP, 5′-Z—VP, or combination thereof.

[0446] In one embodiment, B1 is 2′-OMe or 2′-F, n¹ is 8, T1 is 2′F, n² is 3, B2 is 2′-OMe, n³ is 7, n⁴ is 0, B3 is 2′-OMe, n⁵ is 3, B1′ is 2′-OMe or 2′-F, q¹ is 9, T1′ is 2′-F, q² is 1, B2′ is 2′-OMe or 2′-F, q³ is 4, q⁴ is 0, B3′ is 2′-OMe or 2′-F, q⁵ is 7, T3′ is 2′-F, q⁶ is 1, B4′ is 2′-OMe, and q⁷ is 1. The RNAi agent also comprises a 5′-PS₂.

[0447] In one embodiment, B1 is 2′-OMe or 2′-F, n¹ is 8, T1 is 2′F, n² is 3, B2 is 2′-OMe, n³ is 7, n⁴ is 0, B3 is 2′-OMe, n⁵ is 3, B1′ is 2′-OMe or 2′-F, q¹ is 9, T1′ is 2′-F, q² is 1, B2′ is 2′-OMe or 2′-F, q³ is 4, q⁴ is 0, B3′ is 2′-OMe or 2′-F, q⁵ is 7, T3′ is 2′-F, q⁶ is 1, B4′ is 2′-OMe, and q⁷ is 1. The RNAi agent also comprises a 5′-deoxy-5′-C-malonyl.

[0448] In one embodiment, B1 is 2′-OMe or 2′-F, n¹ is 8, T1 is 2′F, n² is 3, B2 is 2′-OMe, n³ is 7, n⁴ is 0, B3 is 2′-OMe, n⁵ is 3, B1′ is 2′-OMe or 2′-F, q¹ is 9, T1′ is 2′-F, q² is 1, B2′ is 2′-OMe or 2′-F, q³ is 4, q⁴ is 0, B3′ is 2′-OMe or 2′-F, q⁵ is 7, T3′ is 2′-F, q⁶ is 1, B4′ is 2′-OMe, and q⁷ is 1; with two phosphorothioate internucleotide linkage modifications within position 1-5 of the sense strand (counting from the 5′-end), and two phosphorothioate internucleotide linkage modifications at positions 1 and 2 and two phosphorothioate internucleotide linkage modifications within positions 18-23 of the antisense strand (counting from the 5′-end). The RNAi agent also comprises a 5′-P.

[0449] In one embodiment, B1 is 2′-OMe or 2′-F, n¹ is 8, T1 is 2′F, n² is 3, B2 is 2′-OMe, n³ is 7, n⁴ is 0, B3 is 2′-OMe, n⁵ is 3, B1′ is 2′-OMe or 2′-F, q¹ is 9, T1′ is 2′-F, q² is 1, B2′ is 2′-OMe or 2′-F, q³ is 4, q⁴ is 0, B3′ is 2′-OMe or 2′-F, q⁵ is 7, T3′ is 2′-F, q⁶ is 1, B4′ is 2′-OMe, and q⁷ is 1; with two phosphorothioate internucleotide linkage modifications within position 1-5 of the sense strand (counting from the 5′-end), and two phosphorothioate internucleotide linkage modifications at positions 1 and 2 and two phosphorothioate internucleotide linkage modifications within positions 18-23 of the antisense strand (counting from the 5′-end). The RNAi agent also comprises a 5′-PS.

[0450] In one embodiment, B1 is 2′-OMe or 2′-F, n¹ is 8, T1 is 2′F, n² is 3, B2 is 2′-OMe, n³ is 7, n⁴ is 0, B3 is 2′-OMe, n⁵ is 3, B1′ is 2′-OMe or 2′-F, q¹ is 9, T1′ is 2′-F, q² is 1, B2′ is 2′-OMe or 2′-F, q³ is 4, q⁴ is 0, B3′ is 2′-OMe or 2′-F, q⁵ is 7, T3′ is 2′-F, q⁶ is 1, B4′ is 2′-OMe, and q⁷ is 1; with two phosphorothioate internucleotide linkage modifications within position 1-5 of the sense strand (counting from the 5′-end), and two phosphorothioate internucleotide linkage modifications at positions 1 and 2 and two phosphorothioate internucleotide linkage modifications within positions 18-23 of the antisense strand (counting from the 5′-end). The RNAi agent also comprises a 5′-VP. The 5′-VP may be 5′-E-VP, 5′-Z—VP, or combination thereof.

[0451] In one embodiment, B1 is 2′-OMe or 2′-F, n¹ is 8, T1 is 2′F, n² is 3, B2 is 2′-OMe, n³ is 7, n⁴ is 0, B3 is 2′-OMe, n⁵ is 3, B1′ is 2′-OMe or 2′-F, q¹ is 9, T1′ is 2′-F, q² is 1, B2′ is 2′-OMe or 2′-F, q³ is 4, q⁴ is 0, B3′ is 2′-OMe or 2′-F, q⁵ is 7, T3′ is 2′-F, q⁶ is 1, B4′ is 2′-OMe, and q⁷ is 1; with two phosphorothioate internucleotide linkage modifications within position 1-5 of the sense strand (counting from the 5′-end), and two phosphorothioate internucleotide linkage modifications at positions 1 and 2 and two phosphorothioate internucleotide linkage modifications within positions 18-23 of the antisense strand (counting from the 5′-end). The RNAi agent also comprises a 5′-PS₂.

[0452] In one embodiment, B1 is 2′-OMe or 2′-F, n¹ is 8, T1 is 2′F, n² is 3, B2 is 2′-OMe, n³ is 7, n⁴ is 0, B3 is 2′-OMe, n⁵ is 3, B1′ is 2′-OMe or 2′-F, q¹ is 9, T1′ is 2′-F, q² is 1, B2′ is 2′-OMe or 2′-F, q³ is 4, q⁴ is 0, B3′ is 2′-OMe or 2′-F, q⁵ is 7, T3′ is 2′-F, q⁶ is 1, B4′ is 2′-OMe, and q⁷ is 1; with two phosphorothioate internucleotide linkage modifications within position 1-5 of the sense strand (counting from the 5′-end), and two phosphorothioate internucleotide linkage modifications at positions 1 and 2 and two phosphorothioate internucleotide linkage modifications within positions 18-23 of the antisense strand (counting from the 5′-end). The RNAi agent also comprises a 5′-deoxy-5′-C-malonyl.

[0453] In one embodiment, B1 is 2′-OMe or 2′-F, n¹ is 8, T1 is 2′F, n² is 3, B2 is 2′-OMe, n³ is 7, n⁴ is 0, B3 is 2′OMe, n⁵ is 3, B1′ is 2′-OMe or 2′-F, q¹ is 9, T1′ is 2′-F, q² is 1, B2′ is 2′-OMe or 2′-F, q³ is 4, T2′ is 2′-F, q⁴ is 2, B3′ is 2′-OMe or 2′-F, q⁵ is 5, T3′ is 2′-F, q⁶ is 1, B4′ is 2′-F, and q⁷ is 1. The RNAi agent also comprises a 5′-P.

[0454] In one embodiment, B1 is 2′-OMe or 2′-F, n¹ is 8, T1 is 2′F, n² is 3, B2 is 2′-OMe, n³ is 7, n⁴ is 0, B3 is 2′OMe, n⁵ is 3, B1′ is 2′-OMe or 2′-F, q¹ is 9, T1′ is 2′-F, q² is 1, B2′ is 2′-OMe or 2′-F, q³ is 4, T2′ is 2′-F, q⁴ is 2, B3′ is 2′-OMe or 2′-F, q⁵ is 5, T3′ is 2′-F, q⁶ is 1, B4′ is 2′-F, and q⁷ is 1. The RNAi agent also comprises a 5′-PS.

[0455] In one embodiment, B1 is 2′-OMe or 2′-F, n¹ is 8, T1 is 2′F, n² is 3, B2 is 2′-OMe, n³ is 7, n⁴ is 0, B3 is 2′OMe, n⁵ is 3, B1′ is 2′-OMe or 2′-F, q¹ is 9, T1′ is 2′-F, q² is 1, B2′ is 2′-OMe or 2′-F, q³ is 4, T2′ is 2′-F, q⁴ is 2, B3′ is 2′-OMe or 2′-F, q⁵ is 5, T3′ is 2′-F, q⁶ is 1, B4′ is 2′-F, and q⁷ is 1. The RNAi agent also comprises a 5′-VP. The 5′-VP may be 5′-E-VP, 5′-Z—VP, or combination thereof.

In one embodiment, B1 is 2′-OMe or 2′-F, n¹ is 8, T1 is 2′F, n² is 3, B2 is 2′-OMe, n³ is 7, n⁴ is 0, B3 is 2′OMe, n⁵ is 3, B1′ is 2′-OMe or 2′-F, q¹ is 9, T1′ is 2′-F, q² is 1, B2′ is 2′-OMe or 2′-F, q³ is 4, T2′ is 2′-F, q⁴ is 2, B3′ is 2′-OMe or 2′-F, q⁵ is 5, T3′ is 2′-F, q⁶ is 1, B4′ is 2′-F, and q⁷ is 1. The dsRNAi RNA agent also comprises a 5′-PS₂.

[0456] In one embodiment, B1 is 2′-OMe or 2′-F, n¹ is 8, T1 is 2′F, n² is 3, B2 is 2′-OMe, n³ is 7, n⁴ is 0, B3 is 2′OMe, n⁵ is 3, B1′ is 2′-OMe or 2′-F, q¹ is 9, T1′ is 2′-F, q² is 1, B2′ is 2′-OMe or 2′-F, q³ is 4, T2′ is 2′-F, q⁴ is 2, B3′ is 2′-OMe or 2′-F, q⁵ is 5, T3′ is 2′-F, q⁶ is 1, B4′ is 2′-F, and q⁷ is 1. The RNAi agent also comprises a 5′-deoxy-5′-C-malonyl.

[0457] In one embodiment, B1 is 2′-OMe or 2′-F, n¹ is 8, T1 is 2′F, n² is 3, B2 is 2′-OMe, n³ is 7, n⁴ is 0, B3 is 2′-OMe, n⁵ is 3, B1′ is 2′-OMe or 2′-F, q¹ is 9, T1′ is 2′-F, q² is 1, B2′ is 2′-OMe or 2′-F, q³ is 4, T2′ is 2′-F, q⁴ is 2, B3′ is 2′-OMe or 2′-F, q⁵ is 5, T3′ is 2′-F, q⁶ is 1, B4′ is 2′-F, and q⁷ is 1; with two phosphorothioate internucleotide linkage modifications within position 1-5 of the sense strand (counting from the 5′-end of the sense strand), and two phosphorothioate internucleotide linkage modifications at positions 1 and 2 and two phosphorothioate internucleotide linkage modifications within positions 18-23 of the antisense strand (counting from the 5′-end of the antisense strand). The RNAi agent also comprises a 5′-P.

[0458] In one embodiment, B1 is 2′-OMe or 2′-F, n¹ is 8, T1 is 2′F, n² is 3, B2 is 2′-OMe, n³ is 7, n⁴ is 0, B3 is 2′-OMe, n⁵ is 3, B1′ is 2′-OMe or 2′-F, q¹ is 9, T1′ is 2′-F, q² is 1, B2′ is 2′-OMe or 2′-F, q³ is 4, T2′ is 2′-F, q⁴ is 2, B3′ is 2′-OMe or 2′-F, q⁵ is 5, T3′ is 2′-F, q⁶ is 1, B4′ is 2′-F, and q⁷ is 1; with two phosphorothioate internucleotide linkage modifications within position 1-5 of the sense strand (counting from the 5′-end of the sense strand), and two phosphorothioate internucleotide linkage modifications at positions 1 and 2 and two phosphorothioate internucleotide linkage modifications within positions 18-23 of the antisense strand (counting from the 5′-end of the antisense strand). The RNAi agent also comprises a 5′-PS.

[0459] In one embodiment, B1 is 2′-OMe or 2′-F, n¹ is 8, T1 is 2′F, n² is 3, B2 is 2′-OMe, n³ is 7, n⁴ is 0, B3 is 2′-OMe, n⁵ is 3, B1′ is 2′-OMe or 2′-F, q¹ is 9, T1′ is 2′-F, q² is 1, B2′ is 2′-OMe or 2′-F, q³ is 4, T2′ is 2′-F, q⁴ is 2, B3′ is 2′-OMe or 2′-F, q⁵ is 5, T3′ is 2′-F, q⁶ is 1, B4′ is 2′-F, and q⁷ is 1; with two phosphorothioate internucleotide linkage modifications within position 1-5 of the sense strand (counting from the 5′-end of the sense strand), and two phosphorothioate internucleotide linkage modifications at positions 1 and 2 and two phosphorothioate internucleotide linkage modifications within positions 18-23 of the antisense strand (counting from the 5′-end of the antisense strand). The RNAi agent also comprises a 5′-VP. The 5′-VP may be 5′-E-VP, 5′-Z—VP, or combination thereof.

[0460] In one embodiment, B1 is 2′-OMe or 2′-F, n¹ is 8, T1 is 2′F, n² is 3, B2 is 2′-OMe, n³ is 7, n⁴ is 0, B3 is 2′-OMe, n⁵ is 3, B1′ is 2′-OMe or 2′-F, q¹ is 9, T1′ is 2′-F, q² is 1, B2′ is 2′-OMe or 2′-F, q³ is 4, T2′ is 2′-F, q⁴ is 2, B3′ is 2′-OMe or 2′-F, q⁵ is 5, T3′ is 2′-F, q⁶ is 1, B4′ is 2′-F, and q⁷ is 1; with two phosphorothioate internucleotide linkage modifications within position 1-5 of the sense strand (counting from the 5′-end of the sense strand), and two phosphorothioate internucleotide linkage modifications at positions 1 and 2 and two phosphorothioate internucleotide linkage modifications within positions 18-23 of the antisense strand (counting from the 5′-end of the antisense strand). The RNAi agent also comprises a 5′-PS₂.

[0461] In one embodiment, B1 is 2′-OMe or 2′-F, n¹ is 8, T1 is 2′F, n² is 3, B2 is 2′-OMe, n³ is 7, n⁴ is 0, B3 is 2′-OMe, n⁵ is 3, B1′ is 2′-OMe or 2′-F, q¹ is 9, T1′ is 2′-F, q² is 1, B2′ is 2′-OMe or 2′-F, q³ is 4, T2′ is 2′-F, q⁴ is 2, B3′ is 2′-OMe or 2′-F, q⁵ is 5, T3′ is 2′-F, q⁶ is 1, B4′ is 2′-F, and q⁷ is 1; with two phosphorothioate internucleotide linkage modifications within position 1-5 of the sense strand (counting from the 5′-end of the sense strand), and two phosphorothioate internucleotide linkage modifications at positions 1 and 2 and two phosphorothioate internucleotide linkage modifications within positions 18-23 of the antisense strand (counting from the 5′-end of the antisense strand). The RNAi agent also comprises a 5′-deoxy-5′-C-malonyl.

[0462] In one embodiment, B1 is 2′-OMe or 2′-F, n¹ is 8, T1 is 2′F, n² is 3, B2 is 2′-OMe, n³ is 7, n⁴ is 0, B3 is 2′-OMe, n⁵ is 3, B1′ is 2′-OMe or 2′-F, q¹ is 9, T1′ is 2′-F, q² is 1, B2′ is 2′-OMe or 2′-F, q³ is 4, q⁴ is 0, B3′ is 2′-OMe or 2′-F, q⁵ is 7, T3′ is 2′-F, q⁶ is 1, B4′ is 2′-F, and q⁷ is 1. The RNAi agent also comprises a 5′-P.

[0463] In one embodiment, B1 is 2′-OMe or 2′-F, n¹ is 8, T1 is 2′F, n² is 3, B2 is 2′-OMe, n³ is 7, n⁴ is 0, B3 is 2′-OMe, n⁵ is 3, B1′ is 2′-OMe or 2′-F, q¹ is 9, T1′ is 2′-F, q² is 1, B2′ is 2′-OMe or 2′-F, q³ is 4, q⁴ is 0, B3′ is 2′-OMe or 2′-F, q⁵ is 7, T3′ is 2′-F, q⁶ is 1, B4′ is 2′-F, and q⁷ is 1. The RNAi agent also comprises a 5′-PS.

[0464] In one embodiment, B1 is 2′-OMe or 2′-F, n¹ is 8, T1 is 2′F, n² is 3, B2 is 2′-OMe, n³ is 7, n⁴ is 0, B3 is 2′-OMe, n⁵ is 3, B1′ is 2′-OMe or 2′-F, q¹ is 9, T1′ is 2′-F, q² is 1, B2′ is 2′-OMe or 2′-F, q³ is 4, q⁴ is 0, B3′ is 2′-OMe or 2′-F, q⁵ is 7, T3′ is 2′-F, q⁶ is 1, B4′ is 2′-F, and q⁷ is 1. The RNAi agent also comprises a 5′-VP. The 5′-VP may be 5′-E-VP, 5′-Z—VP, or combination thereof.

[0465] In one embodiment, B1 is 2′-OMe or 2′-F, n¹ is 8, T1 is 2′F, n² is 3, B2 is 2′-OMe, n³ is 7, n⁴ is 0, B3 is 2′-OMe, n⁵ is 3, B1′ is 2′-OMe or 2′-F, q¹ is 9, T1′ is 2′-F, q² is 1, B2′ is 2′-OMe or 2′-F, q³ is 4, q⁴ is 0, B3′ is 2′-OMe or 2′-F, q⁵ is 7, T3′ is 2′-F, q⁶ is 1, B4′ is 2′-F, and q⁷ is 1. The RNAi agent also comprises a 5′-PS₂.

[0466] In one embodiment, B1 is 2′-OMe or 2′-F, n¹ is 8, T1 is 2′F, n² is 3, B2 is 2′-OMe, n³ is 7, n⁴ is 0, B3 is 2′-OMe, n⁵ is 3, B1′ is 2′-OMe or 2′-F, q¹ is 9, T1′ is 2′-F, q² is 1, B2′ is 2′-OMe or 2′-F, q³ is 4, q⁴ is 0, B3′ is 2′-OMe or 2′-F, q⁵ is 7, T3′ is 2′-F, q⁶ is 1, B4′ is 2′-F, and q⁷ is 1. The RNAi agent also comprises a 5′-deoxy-5′-C-malonyl.

[0467] In one embodiment, B1 is 2′-OMe or 2′-F, n¹ is 8, T1 is 2′F, n² is 3, B2 is 2′-OMe, n³ is 7, n⁴ is 0, B3 is 2′-OMe, n⁵ is 3, B1′ is 2′-OMe or 2′-F, q¹ is 9, T1′ is 2′-F, q² is 1, B2′ is 2′-OMe or 2′-F, q³ is 4, q⁴ is 0, B3′ is 2′-OMe or 2′-F, q⁵ is 7, T3′ is 2′-F, q⁶ is 1, B4′ is 2′-F, and q⁷ is 1; with two phosphorothioate internucleotide linkage modifications within position 1-5 of the sense strand (counting from the 5′-end of the sense strand), and two phosphorothioate internucleotide linkage modifications at positions 1 and 2 and two phosphorothioate internucleotide linkage modifications within positions 18-23 of the antisense strand (counting from the 5′-end of the antisense strand). The RNAi agent also comprises a 5′-P.

[0468] In one embodiment, B1 is 2′-OMe or 2′-F, n¹ is 8, T1 is 2′F, n² is 3, B2 is 2′-OMe, n³ is 7, n⁴ is 0, B3 is 2′-OMe, n⁵ is 3, B1′ is 2′-OMe or 2′-F, q¹ is 9, T1′ is 2′-F, q² is 1, B2′ is 2′-OMe or 2′-F, q³ is 4, q⁴ is 0, B3′ is 2′-OMe or 2′-F, q⁵ is 7, T3′ is 2′-F, q⁶ is 1, B4′ is 2′-F, and q⁷ is 1; with two phosphorothioate internucleotide linkage modifications within position 1-5 of the sense strand (counting from the 5′-end of the sense strand), and two phosphorothioate internucleotide linkage modifications at positions 1 and 2 and two phosphorothioate internucleotide linkage modifications within positions 18-23 of the antisense strand (counting from the 5′-end of the antisense strand). The RNAi agent also comprises a 5′-PS.

[0469] In one embodiment, B1 is 2′-OMe or 2′-F, n¹ is 8, T1 is 2′F, n² is 3, B2 is 2′-OMe, n³ is 7, n⁴ is 0, B3 is 2′-OMe, n⁵ is 3, B1′ is 2′-OMe or 2′-F, q¹ is 9, T1′ is 2′-F, q² is 1, B2′ is 2′-OMe or 2′-F, q³ is 4, q⁴ is 0, B3′ is 2′-OMe or 2′-F, q⁵ is 7, T3′ is 2′-F, q⁶ is 1, B4′ is 2′-F, and q⁷ is 1; with two phosphorothioate internucleotide linkage modifications within position 1-5 of the sense strand (counting from the 5′-end of the sense strand), and two phosphorothioate internucleotide linkage modifications at positions 1 and 2 and two phosphorothioate internucleotide linkage modifications within positions 18-23 of the antisense strand (counting from the 5′-end of the antisense strand). The RNAi agent also comprises a 5′-VP. The 5′-VP may be 5′-E-VP, 5′-Z—VP, or combination thereof.

[0470] In one embodiment, B1 is 2′-OMe or 2′-F, n¹ is 8, T1 is 2′F, n² is 3, B2 is 2′-OMe, n³ is 7, n⁴ is 0, B3 is 2′-OMe, n⁵ is 3, B1′ is 2′-OMe or 2′-F, q¹ is 9, T1′ is 2′-F, q² is 1, B2′ is 2′-OMe or 2′-F, q³ is 4, q⁴ is 0, B3′ is 2′-OMe or 2′-F, q⁵ is 7, T3′ is 2′-F, q⁶ is 1, B4′ is 2′-F, and q⁷ is 1; with two phosphorothioate internucleotide linkage modifications within position 1-5 of the sense strand (counting from the 5′-end of the sense strand), and two phosphorothioate internucleotide linkage modifications at positions 1 and 2 and two phosphorothioate internucleotide linkage modifications within positions 18-23 of the antisense strand (counting from the 5′-end of the antisense strand). The RNAi agent also comprises a 5′-PS₂.

[0471] In one embodiment, B1 is 2′-OMe or 2′-F, n¹ is 8, T1 is 2′F, n² is 3, B2 is 2′-OMe, n³ is 7, n⁴ is 0, B3 is 2′-OMe, n⁵ is 3, B1′ is 2′-OMe or 2′-F, q¹ is 9, T1′ is 2′-F, q² is 1, B2′ is 2′-OMe or 2′-F, q³ is 4, q⁴ is 0, B3′ is 2′-OMe or 2′-F, q⁵ is 7, T3′ is 2′-F, q⁶ is 1, B4′ is 2′-F, and q⁷ is 1; with two phosphorothioate internucleotide linkage modifications within position 1-5 of the sense strand (counting from the 5′-end of the sense strand), and two phosphorothioate internucleotide linkage modifications at positions 1 and 2 and two phosphorothioate internucleotide linkage modifications within positions 18-23 of the antisense strand (counting from the 5′-end of the antisense strand). The RNAi agent also comprises a 5′-deoxy-5′-C-malonyl.

[0472] In one embodiment, B1 is 2′-OMe or 2′-F, n¹ is 8, T1 is 2′F, n² is 3, B2 is 2′-OMe, n³ is 7, n⁴ is 0, B3 is 2′-OMe, n⁵ is 3, B1′ is 2′-OMe or 2′-F, q¹ is 9, T1′ is 2′-F, q² is 1, B2′ is 2′-OMe or 2′-F, q³ is 4, T2′ is 2′-F, q⁴ is 2, B3′ is 2′-OMe or 2′-F, q⁵ is 5, T3′ is 2′-F, q⁶ is 1, B4′ is 2′-OMe, and q⁷ is 1; with two phosphorothioate internucleotide linkage modifications within position 1-5 of the sense strand (counting from the 5′-end of the sense strand), and two phosphorothioate internucleotide linkage modifications at positions 1 and 2 and two phosphorothioate internucleotide linkage modifications within positions 18-23 of the antisense strand (counting from the 5′-end of the antisense strand). The RNAi agent also comprises a 5′-P and a targeting ligand. In one embodiment, the 5′-P is at the 5′-end of the antisense strand, and the targeting ligand is at the 3′-end of the sense strand.

[0473] In one embodiment, B1 is 2′-OMe or 2′-F, n¹ is 8, T1 is 2′F, n² is 3, B2 is 2′-OMe, n³ is 7, n⁴ is 0, B3 is 2′-OMe, n⁵ is 3, B1′ is 2′-OMe or 2′-F, q¹ is 9, T1′ is 2′-F, q² is 1, B2′ is 2′-OMe or 2′-F, q³ is 4, T2′ is 2′-F, q⁴ is 2, B3′ is 2′-OMe or 2′-F, q⁵ is 5, T3′ is 2′-F, q⁶ is 1, B4′ is 2′-OMe, and q⁷ is 1; with two phosphorothioate internucleotide linkage modifications within position 1-5 of the sense strand (counting from the 5′-end of the sense strand), and two phosphorothioate internucleotide linkage modifications at positions 1 and 2 and two phosphorothioate internucleotide linkage modifications within positions 18-23 of the antisense strand (counting from the 5′-end of the antisense strand). The RNAi agent also comprises a 5′-PS and a targeting ligand. In one embodiment, the 5′-PS is at the 5′-end of the antisense strand, and the targeting ligand is at the 3′-end of the sense strand.

[0474] In one embodiment, B1 is 2′-OMe or 2′-F, n¹ is 8, T1 is 2′F, n² is 3, B2 is 2′-OMe, n³ is 7, n⁴ is 0, B3 is 2′-OMe, n⁵ is 3, B1′ is 2′-OMe or 2′-F, q¹ is 9, T1′ is 2′-F, q² is 1, B2′ is 2′-OMe or 2′-F, q³ is 4, T2′ is 2′-F, q⁴ is 2, B3′ is 2′-OMe or 2′-F, q⁵ is 5, T3′ is 2′-F, q⁶ is 1, B4′ is 2′-OMe, and q⁷ is 1; with two phosphorothioate internucleotide linkage modifications within position 1-5 of the sense strand (counting from the 5′-end of the sense strand), and two phosphorothioate internucleotide linkage modifications at positions 1 and 2 and two phosphorothioate internucleotide linkage modifications within positions 18-23 of the antisense strand (counting from the 5′-end of the antisense strand). The RNAi agent also comprises a 5′-VP (e.g., a 5′-E-VP, 5′-Z—VP, or combination thereof), and a targeting ligand.

[0475] In one embodiment, the 5′-VP is at the 5′-end of the antisense strand, and the targeting ligand is at the 3′-end of the sense strand.

[0476] In one embodiment, B1 is 2′-OMe or 2′-F, n¹ is 8, T1 is 2′F, n² is 3, B2 is 2′-OMe, n³ is 7, n⁴ is 0, B3 is 2′-OMe, n⁵ is 3, B1′ is 2′-OMe or 2′-F, q¹ is 9, T1′ is 2′-F, q² is 1, B2′ is 2′-OMe or 2′-F, q³ is 4, T2′ is 2′-F, q⁴ is 2, B3′ is 2′-OMe or 2′-F, q⁵ is 5, T3′ is 2′-F, q⁶ is 1, B4′ is 2′-OMe, and q⁷ is 1; with two phosphorothioate internucleotide linkage modifications within position 1-5 of the sense strand (counting from the 5′-end of the sense strand), and two phosphorothioate internucleotide linkage modifications at positions 1 and 2 and two phosphorothioate internucleotide linkage modifications within positions 18-23 of the antisense strand (counting from the 5′-end of the antisense strand). The RNAi agent also comprises a 5′-PS₂ and a targeting ligand. In one embodiment, the 5′-PS₂ is at the 5′-end of the antisense strand, and the targeting ligand is at the 3′-end of the sense strand.

[0477] In one embodiment, B1 is 2′-OMe or 2′-F, n¹ is 8, T1 is 2′F, n² is 3, B2 is 2′-OMe, n³ is 7, n⁴ is 0, B3 is 2′-OMe, n⁵ is 3, B1′ is 2′-OMe or 2′-F, q¹ is 9, T1′ is 2′-F, q² is 1, B2′ is 2′-OMe or 2′-F, q³ is 4, T2′ is 2′-F, q⁴ is 2, B3′ is 2′-OMe or 2′-F, q⁵ is 5, T3′ is 2′-F, q⁶ is 1, B4′ is 2′-OMe, and q⁷ is 1; with two phosphorothioate internucleotide linkage modifications within position 1-5 of the sense strand (counting from the 5′-end of the sense strand), and two phosphorothioate internucleotide linkage modifications at positions 1 and 2 and two phosphorothioate internucleotide linkage modifications within positions 18-23 of the antisense strand (counting from the 5′-end of the antisense strand). The RNAi agent also comprises a 5′-deoxy-5′-C-malonyl and a targeting ligand. In one embodiment, the 5′-deoxy-5′-C-malonyl is at the 5′-end of the antisense strand, and the targeting ligand is at the 3′-end of the sense strand.

[0478] In one embodiment, B1 is 2′-OMe or 2′-F, n¹ is 8, T1 is 2′F, n² is 3, B2 is 2′-OMe, n³ is 7, n⁴ is 0, B3 is 2′-OMe, n⁵ is 3, B1′ is 2′-OMe or 2′-F, q¹ is 9, T1′ is 2′-F, q² is 1, B2′ is 2′-OMe or 2′-F, q³ is 4, q⁴ is 0, B3′ is 2′-OMe or 2′-F, q⁵ is 7, T3′ is 2′-F, q⁶ is 1, B4′ is 2′-OMe, and q⁷ is 1; with two phosphorothioate internucleotide linkage modifications within position 1-5 of the sense strand (counting from the 5′-end), and two phosphorothioate internucleotide linkage modifications at positions 1 and 2 and two phosphorothioate internucleotide linkage modifications within positions 18-23 of the antisense strand (counting from the 5′-end). The RNAi agent also comprises a 5′-P and a targeting ligand. In one embodiment, the 5′-P is at the 5′-end of the antisense strand, and the targeting ligand is at the 3′-end of the sense strand.

[0479] In one embodiment, B1 is 2′-OMe or 2′-F, n¹ is 8, T1 is 2′F, n² is 3, B2 is 2′-OMe, n³ is 7, n⁴ is 0, B3 is 2′-OMe, n⁵ is 3, B1′ is 2′-OMe or 2′-F, q¹ is 9, T1′ is 2′-F, q² is 1, B2′ is 2′-OMe or 2′-F, q³ is 4, q⁴ is 0, B3′ is 2′-OMe or 2′-F, q⁵ is 7, T3′ is 2′-F, q⁶ is 1, B4′ is 2′-OMe, and q⁷ is 1; with two phosphorothioate internucleotide linkage modifications within position 1-5 of the sense strand (counting from the 5′-end), and two phosphorothioate internucleotide linkage modifications at positions 1 and 2 and two phosphorothioate internucleotide linkage modifications within positions 18-23 of the antisense strand (counting from the 5′-end). The RNAi agent also comprises a 5′-PS and a targeting ligand. In one embodiment, the 5′-PS is at the 5′-end of the antisense strand, and the targeting ligand is at the 3′-end of the sense strand.

[0480] In one embodiment, B1 is 2′-OMe or 2′-F, n¹ is 8, T1 is 2′F, n² is 3, B2 is 2′-OMe, n³ is 7, n⁴ is 0, B3 is 2′-OMe, n⁵ is 3, B1′ is 2′-OMe or 2′-F, q¹ is 9, T1′ is 2′-F, q² is 1, B2′ is 2′-OMe or 2′-F, q³ is 4, q⁴ is 0, B3′ is 2′-OMe or 2′-F, q⁵ is 7, T3′ is 2′-F, q⁶ is 1, B4′ is 2′-OMe, and q⁷ is 1; with two phosphorothioate internucleotide linkage modifications within position 1-5 of the sense strand (counting from the 5′-end), and two phosphorothioate internucleotide linkage modifications at positions 1 and 2 and two phosphorothioate internucleotide linkage modifications within positions 18-23 of the antisense strand (counting from the 5′-end). The RNAi agent also comprises a 5′-VP (e.g., a 5′-E-VP, 5′-Z—VP, or combination thereof) and a targeting ligand. In one embodiment, the 5′-VP is at the 5′-end of the antisense strand, and the targeting ligand is at the 3′-end of the sense strand.

[0481] In one embodiment, B1 is 2′-OMe or 2′-F, n¹ is 8, T1 is 2′F, n² is 3, B2 is 2′-OMe, n³ is 7, n⁴ is 0, B3 is 2′-OMe, n⁵ is 3, B1′ is 2′-OMe or 2′-F, q¹ is 9, T1′ is 2′-F, q² is 1, B2′ is 2′-OMe or 2′-F, q³ is 4, q⁴ is 0, B3′ is 2′-OMe or 2′-F, q⁵ is 7, T3′ is 2′-F, q⁶ is 1, B4′ is 2′-OMe, and q⁷ is 1; with two phosphorothioate internucleotide linkage modifications within position 1-5 of the sense strand (counting from the 5′-end), and two phosphorothioate internucleotide linkage modifications at positions 1 and 2 and two phosphorothioate internucleotide linkage modifications within positions 18-23 of the antisense strand (counting from the 5′-end). The RNAi agent also comprises a 5′-PS₂ and a targeting ligand. In one embodiment, the 5′-PS₂ is at the 5′-end of the antisense strand, and the targeting ligand is at the 3′-end of the sense strand.

[0482] In one embodiment, B1 is 2′-OMe or 2′-F, n¹ is 8, T1 is 2′F, n² is 3, B2 is 2′-OMe, n³ is 7, n⁴ is 0, B3 is 2′-OMe, n⁵ is 3, B1′ is 2′-OMe or 2′-F, q¹ is 9, T1′ is 2′-F, q² is 1, B2′ is 2′-OMe or 2′-F, q³ is 4, q⁴ is 0, B3′ is 2′-OMe or 2′-F, q⁵ is 7, T3′ is 2′-F, q⁶ is 1, B4′ is 2′-OMe, and q⁷ is 1; with two phosphorothioate internucleotide linkage modifications within position 1-5 of the sense strand (counting from the 5′-end), and two phosphorothioate internucleotide linkage modifications at positions 1 and 2 and two phosphorothioate internucleotide linkage modifications within positions 18-23 of the antisense strand (counting from the 5′-end). The RNAi agent also comprises a 5′-deoxy-5′-C-malonyl and a targeting ligand. In one embodiment, the 5′-deoxy-5′-C-malonyl is at the 5′-end of the antisense strand, and the targeting ligand is at the 3′-end of the sense strand.

[0483] In one embodiment, B1 is 2′-OMe or 2′-F, n¹ is 8, T1 is 2′F, n² is 3, B2 is 2′-OMe, n³ is 7, n⁴ is 0, B3 is 2′-OMe, n⁵ is 3, B1′ is 2′-OMe or 2′-F, q¹ is 9, T1′ is 2′-F, q² is 1, B2′ is 2′-OMe or 2′-F, q³ is 4, T2′ is 2′-F, q⁴ is 2, B3′ is 2′-OMe or 2′-F, q⁵ is 5, T3′ is 2′-F, q⁶ is 1, B4′ is 2′-F, and q⁷ is 1; with two phosphorothioate internucleotide linkage modifications within position 1-5 of the sense strand (counting from the 5′-end of the sense strand), and two phosphorothioate internucleotide linkage modifications at positions 1 and 2 and two phosphorothioate internucleotide linkage modifications within positions 18-23 of the antisense strand (counting from the 5′-end of the antisense strand). The RNAi agent also comprises a 5′-P and a targeting ligand. In one embodiment, the 5′-P is at the 5′-end of the antisense strand, and the targeting ligand is at the 3′-end of the sense strand.

[0484] In one embodiment, B1 is 2′-OMe or 2′-F, n¹ is 8, T1 is 2′F, n² is 3, B2 is 2′-OMe, n³ is 7, n⁴ is 0, B3 is 2′-OMe, n⁵ is 3, B1′ is 2′-OMe or 2′-F, q¹ is 9, T1′ is 2′-F, q² is 1, B2′ is 2′-OMe or 2′-F, q³ is 4, T2′ is 2′-F, q⁴ is 2, B3′ is 2′-OMe or 2′-F, q⁵ is 5, T3′ is 2′-F, q⁶ is 1, B4′ is 2′-F, and q⁷ is 1; with two phosphorothioate internucleotide linkage modifications within position 1-5 of the sense strand (counting from the 5′-end of the sense strand), and two phosphorothioate internucleotide linkage modifications at positions 1 and 2 and two phosphorothioate internucleotide linkage modifications within positions 18-23 of the antisense strand (counting from the 5′-end of the antisense strand). The RNAi agent also comprises a 5′-PS and a targeting ligand. In one embodiment, the 5′-PS is at the 5′-end of the antisense strand, and the targeting ligand is at the 3′-end of the sense strand.

[0485] In one embodiment, B1 is 2′-OMe or 2′-F, n¹ is 8, T1 is 2′F, n² is 3, B2 is 2′-OMe, n³ is 7, n⁴ is 0, B3 is 2′-OMe, n⁵ is 3, B1′ is 2′-OMe or 2′-F, q¹ is 9, T1′ is 2′-F, q² is 1, B2′ is 2′-OMe or 2′-F, q³ is 4, T2′ is 2′-F, q⁴ is 2, B3′ is 2′-OMe or 2′-F, q⁵ is 5, T3′ is 2′-F, q⁶ is 1, B4′ is 2′-F, and q⁷ is 1; with two phosphorothioate internucleotide linkage modifications within position 1-5 of the sense strand (counting from the 5′-end of the sense strand), and two phosphorothioate internucleotide linkage modifications at positions 1 and 2 and two phosphorothioate internucleotide linkage modifications within positions 18-23 of the antisense strand (counting from the 5′-end of the antisense strand). The RNAi agent also comprises a 5′-VP (e.g., a 5′-E-VP, 5′-Z—VP, or combination thereof) and a targeting ligand. In one embodiment, the 5′-VP is at the 5′-end of the antisense strand, and the targeting ligand is at the 3′-end of the sense strand.

[0486] In one embodiment, B1 is 2′-OMe or 2′-F, n¹ is 8, T1 is 2′F, n² is 3, B2 is 2′-OMe, n³ is 7, n⁴ is 0, B3 is 2′-OMe, n⁵ is 3, B1′ is 2′-OMe or 2′-F, q¹ is 9, T1′ is 2′-F, q² is 1, B2′ is 2′-OMe or 2′-F, q³ is 4, T2′ is 2′-F, q⁴ is 2, B3′ is 2′-OMe or 2′-F, q⁵ is 5, T3′ is 2′-F, q⁶ is 1, B4′ is 2′-F, and q⁷ is 1; with two phosphorothioate internucleotide linkage modifications within position 1-5 of the sense strand (counting from the 5′-end of the sense strand), and two phosphorothioate internucleotide linkage modifications at positions 1 and 2 and two phosphorothioate internucleotide linkage modifications within positions 18-23 of the antisense strand (counting from the 5′-end of the antisense strand). The RNAi agent also comprises a 5′-PS₂ and a targeting ligand. In one embodiment, the 5′-PS₂ is at the 5′-end of the antisense strand, and the targeting ligand is at the 3′-end of the sense strand.

[0487] In one embodiment, B1 is 2′-OMe or 2′-F, n¹ is 8, T1 is 2′F, n² is 3, B2 is 2′-OMe, n³ is 7, n⁴ is 0, B3 is 2′-OMe, n⁵ is 3, B1′ is 2′-OMe or 2′-F, q¹ is 9, T1′ is 2′-F, q² is 1, B2′ is 2′-OMe or 2′-F, q³ is 4, T2′ is 2′-F, q⁴ is 2, B3′ is 2′-OMe or 2′-F, q⁵ is 5, T3′ is 2′-F, q⁶ is 1, B4′ is 2′-F, and q⁷ is 1; with two phosphorothioate internucleotide linkage modifications within position 1-5 of the sense strand (counting from the 5′-end of the sense strand), and two phosphorothioate internucleotide linkage modifications at positions 1 and 2 and two phosphorothioate internucleotide linkage modifications within positions 18-23 of the antisense strand (counting from the 5′-end of the antisense strand). The RNAi agent also comprises a 5′-deoxy-5′-C-malonyl and a targeting ligand. In one embodiment, the 5′-deoxy-5′-C-malonyl is at the 5′-end of the antisense strand, and the targeting ligand is at the 3′-end of the sense strand.

[0488] In one embodiment, B1 is 2′-OMe or 2′-F, n¹ is 8, T1 is 2′F, n² is 3, B2 is 2′-OMe, n³ is 7, n⁴ is 0, B3 is 2′-OMe, n⁵ is 3, B1′ is 2′-OMe or 2′-F, q¹ is 9, T1′ is 2′-F, q² is 1, B2′ is 2′-OMe or 2′-F, q³ is 4, q⁴ is 0, B3′ is 2′-OMe or 2′-F, q⁵ is 7, T3′ is 2′-F, q⁶ is 1, B4′ is 2′-F, and q⁷ is 1; with two phosphorothioate internucleotide linkage modifications within position 1-5 of the sense strand (counting from the 5′-end of the sense strand), and two phosphorothioate internucleotide linkage modifications at positions 1 and 2 and two phosphorothioate internucleotide linkage modifications within positions 18-23 of the antisense strand (counting from the 5′-end of the antisense strand). The RNAi agent also comprises a 5′-P and a targeting ligand. In one embodiment, the 5′-P is at the 5′-end of the antisense strand, and the targeting ligand is at the 3′-end of the sense strand.

[0489] In one embodiment, B1 is 2′-OMe or 2′-F, n¹ is 8, T1 is 2′F, n² is 3, B2 is 2′-OMe, n³ is 7, n⁴ is 0, B3 is 2′-OMe, n⁵ is 3, B1′ is 2′-OMe or 2′-F, q¹ is 9, T1′ is 2′-F, q² is 1, B2′ is 2′-OMe or 2′-F, q³ is 4, q⁴ is 0, B3′ is 2′-OMe or 2′-F, q⁵ is 7, T3′ is 2′-F, q⁶ is 1, B4′ is 2′-F, and q⁷ is 1; with two phosphorothioate internucleotide linkage modifications within position 1-5 of the sense strand (counting from the 5′-end of the sense strand), and two phosphorothioate internucleotide linkage modifications at positions 1 and 2 and two phosphorothioate internucleotide linkage modifications within positions 18-23 of the antisense strand (counting from the 5′-end of the antisense strand). The RNAi agent also comprises a 5′-PS and a targeting ligand. In one embodiment, the 5′-PS is at the 5′-end of the antisense strand, and the targeting ligand is at the 3′-end of the sense strand.

[0490] In one embodiment, B1 is 2′-OMe or 2′-F, n¹ is 8, T1 is 2′F, n² is 3, B2 is 2′-OMe, n³ is 7, n⁴ is 0, B3 is 2′-OMe, n⁵ is 3, B1′ is 2′-OMe or 2′-F, q¹ is 9, T1′ is 2′-F, q² is 1, B2′ is 2′-OMe or 2′-F, q³ is 4, q⁴ is 0, B3′ is 2′-OMe or 2′-F, q⁵ is 7, T3′ is 2′-F, q⁶ is 1, B4′ is 2′-F, and q⁷ is 1; with two phosphorothioate internucleotide linkage modifications within position 1-5 of the sense strand (counting from the 5′-end of the sense strand), and two phosphorothioate internucleotide linkage modifications at positions 1 and 2 and two phosphorothioate internucleotide linkage modifications within positions 18-23 of the antisense strand (counting from the 5′-end of the antisense strand). The RNAi agent also comprises a 5′-VP (e.g., a 5′-E-VP, 5′-Z—VP, or combination thereof) and a targeting ligand. In one embodiment, the 5′-VP is at the 5′-end of the antisense strand, and the targeting ligand is at the 3′-end of the sense strand.

[0491] In one embodiment, B1 is 2′-OMe or 2′-F, n¹ is 8, T1 is 2′F, n² is 3, B2 is 2′-OMe, n³ is 7, n⁴ is 0, B3 is 2′-OMe, n⁵ is 3, B1′ is 2′-OMe or 2′-F, q¹ is 9, T1′ is 2′-F, q² is 1, B2′ is 2′-OMe or 2′-F, q³ is 4, q⁴ is 0, B3′ is 2′-OMe or 2′-F, q⁵ is 7, T3′ is 2′-F, q⁶ is 1, B4′ is 2′-F, and q⁷ is 1; with two phosphorothioate internucleotide linkage modifications within position 1-5 of the sense strand (counting from the 5′-end of the sense strand), and two phosphorothioate internucleotide linkage modifications at positions 1 and 2 and two phosphorothioate internucleotide linkage modifications within positions 18-23 of the antisense strand (counting from the 5′-end of the antisense strand). The RNAi agent also comprises a 5′-PS₂ and a targeting ligand. In one embodiment, the 5′-PS₂ is at the 5′-end of the antisense strand, and the targeting ligand is at the 3′-end of the sense strand.

[0492] In one embodiment, B1 is 2′-OMe or 2′-F, n¹ is 8, T1 is 2′F, n² is 3, B2 is 2′-OMe, n³ is 7, n⁴ is 0, B3 is 2′-OMe, n⁵ is 3, B1′ is 2′-OMe or 2′-F, q¹ is 9, T1′ is 2′-F, q² is 1, B2′ is 2′-OMe or 2′-F, q³ is 4, q⁴ is 0, B3′ is 2′-OMe or 2′-F, q⁵ is 7, T3′ is 2′-F, q⁶ is 1, B4′ is 2′-F, and q⁷ is 1; with two phosphorothioate internucleotide linkage modifications within position 1-5 of the sense strand (counting from the 5′-end of the sense strand), and two phosphorothioate internucleotide linkage modifications at positions 1 and 2 and two phosphorothioate internucleotide linkage modifications within positions 18-23 of the antisense strand (counting from the 5′-end of the antisense strand). The RNAi agent also comprises a 5′-deoxy-5′-C-malonyl and a targeting ligand. In one embodiment, the 5′-deoxy-5′-C-malonyl is at the 5′-end of the antisense strand, and the targeting ligand is at the 3′-end of the sense strand.

[0493] In a particular embodiment, an RNAi agent of the present invention comprises:
[0494] (a) a sense strand having:
   [0495] (i) a length of 21 nucleotides;
   [0496] (ii) an ASGPR ligand attached to the 3′-end, wherein said ASGPR ligand comprises three GalNAc derivatives attached through a trivalent branched linker; and
   [0497] (iii) 2′-F modifications at positions 1, 3, 5, 7, 9 to 11, 13, 17, 19, and 21, and 2′-OMe
   [0498] modifications at positions 2, 4, 6, 8, 12, 14 to 16, 18, and 20 (counting from the 5′ end); and
[0499] (b) an antisense strand having:
   [0500] (i) a length of 23 nucleotides;
   [0501] (ii) 2′-OMe modifications at positions 1, 3, 5, 9, 11 to 13, 15, 17, 19, 21, and 23, and 2′F modifications at positions 2, 4, 6 to 8, 10, 14, 16, 18, 20, and 22 (counting from the 5′ end); and
   [0502] (iii) phosphorothioate internucleotide linkages between nucleotide positions 21 and 22,
   [0503] and between nucleotide positions 22 and 23 (counting from the 5′ end);
[0504] wherein the dsRNA agents have a two nucleotide overhang at the 3′-end of the antisense strand, and a blunt end at the 5′-end of the antisense strand.

[0505] In another particular embodiment, an RNAi agent of the present invention comprises:
[0506] (a) a sense strand having:
[0507] (i) a length of 21 nucleotides;
[0508] (ii) an ASGPR ligand attached to the 3′-end, wherein said ASGPR ligand comprises three GalNAc derivatives attached through a trivalent branched linker;
   [0509] (iii) 2′-F modifications at positions 1, 3, 5, 7, 9 to 11, 13, 15, 17, 19, and 21, and 2′-OMe modifications at positions 2, 4, 6, 8, 12, 14, 16, 18, and 20 (counting from the 5′ end); and
   [0510] (iv) phosphorothioate internucleotide linkages between nucleotide positions 1 and 2, and between nucleotide positions 2 and 3 (counting from the 5′ end);
[0511] and
[0512] (b) an antisense strand having:
   [0513] (i) a length of 23 nucleotides;
   [0514] (ii) 2′-OMe modifications at positions 1, 3, 5, 7, 9, 11 to 13, 15, 17, 19, and 21 to 23, and 2′F modifications at positions 2, 4, 6, 8, 10, 14, 16, 18, and 20 (counting from the 5′ end); and
   [0515] (iii) phosphorothioate internucleotide linkages between nucleotide positions 1 and 2, between nucleotide positions 2 and 3, between nucleotide positions 21 and 22, and between nucleotide positions 22 and 23 (counting from the 5′ end);
[0516] wherein the RNAi agents have a two nucleotide overhang at the 3′-end of the antisense strand, and a blunt end at the 5′-end of the antisense strand.

[0517] In another particular embodiment, a RNAi agent of the present invention comprises:
[0518] (a) a sense strand having:
   [0519] (i) a length of 21 nucleotides;
   [0520] (ii) an ASGPR ligand attached to the 3′-end, wherein said ASGPR ligand comprises three GalNAc derivatives attached through a trivalent branched linker;
   [0521] (iii) 2′-OMe modifications at positions 1 to 6, 8, 10, and 12 to 21, 2′-F modifications at positions 7, and 9, and a deoxy-nucleotide (e.g. dT) at position 11 (counting from the 5′ end); and
   [0522] (iv) phosphorothioate internucleotide linkages between nucleotide positions 1 and 2, and between nucleotide positions 2 and 3 (counting from the 5′ end);
[0523] and
[0524] (b) an antisense strand having:
   [0525] (i) a length of 23 nucleotides;
   [0526] (ii) 2′-OMe modifications at positions 1, 3, 7, 9, 11, 13, 15, 17, and 19 to 23, and 2′-F modifications at positions 2, 4 to 6, 8, 10, 12, 14, 16, and 18 (counting from the 5′ end); and
   [0527] (iii) phosphorothioate internucleotide linkages between nucleotide positions 1 and 2, between nucleotide positions 2 and 3, between nucleotide positions 21 and 22, and between nucleotide positions 22 and 23 (counting from the 5′ end);
      wherein the RNAi agents have a two nucleotide overhang at the 3′-end of the antisense strand, and a blunt end at the 5′-end of the antisense strand.

[0528] In another particular embodiment, a RNAi agent of the present invention comprises:
[0529] (a) a sense strand having:
   [0530] (i) a length of 21 nucleotides;
   [0531] (ii) an ASGPR ligand attached to the 3′-end, wherein said ASGPR ligand comprises three GalNAc derivatives attached through a trivalent branched linker;
   [0532] (iii) 2′-OMe modifications at positions 1 to 6, 8, 10, 12, 14, and 16 to 21, and 2′-F modifications at positions 7, 9, 11, 13, and 15; and
   [0533] (iv) phosphorothioate internucleotide linkages between nucleotide positions 1 and 2, and between nucleotide positions 2 and 3 (counting from the 5′ end);
[0534] and
[0535] (b) an antisense strand having:
   [0536] (i) a length of 23 nucleotides;
   [0537] (ii) 2′-OMe modifications at positions 1, 5, 7, 9, 11, 13, 15, 17, 19, and 21 to 23, and 2′-F modifications at positions 2 to 4, 6, 8, 10, 12, 14, 16, 18, and 20 (counting from the 5′ end); and
   [0538] (iii) phosphorothioate internucleotide linkages between nucleotide positions 1 and 2, between nucleotide positions 2 and 3, between nucleotide positions 21 and 22, and between nucleotide positions 22 and 23 (counting from the 5′ end);
      wherein the RNAi agents have a two nucleotide overhang at the 3′-end of the antisense strand, and a blunt end at the 5′-end of the antisense strand.

[0539] In another particular embodiment, a RNAi agent of the present invention comprises:
[0540] (a) a sense strand having:
   [0541] (i) a length of 21 nucleotides;
   [0542] (ii) an ASGPR ligand attached to the 3′-end, wherein said ASGPR ligand comprises three GalNAc derivatives attached through a trivalent branched linker;
   [0543] (iii) 2′-OMe modifications at positions 1 to 9, and 12 to 21, and 2′-F modifications at positions 10, and 11; and
   [0544] (iv) phosphorothioate internucleotide linkages between nucleotide positions 1 and 2, and between nucleotide positions 2 and 3 (counting from the 5′ end);
[0545] and
[0546] (b) an antisense strand having:
   [0547] (i) a length of 23 nucleotides;
   [0548] (ii) 2′-OMe modifications at positions 1, 3, 5, 7, 9, 11 to 13, 15, 17, 19, and 21 to 23, and 2′-F modifications at positions 2, 4, 6, 8, 10, 14, 16, 18, and 20 (counting from the 5′ end); and
   [0549] (iii) phosphorothioate internucleotide linkages between nucleotide positions 1 and 2, between nucleotide positions 2 and 3, between nucleotide positions 21 and 22, and between nucleotide positions 22 and 23 (counting from the 5′ end);
      wherein the RNAi agents have a two nucleotide overhang at the 3′-end of the antisense strand, and a blunt end at the 5′-end of the antisense strand.

[0550] In another particular embodiment, a RNAi agent of the present invention comprises:
[0551] (a) a sense strand having:
   [0552] (i) a length of 21 nucleotides;
   [0553] (ii) an ASGPR ligand attached to the 3′-end, wherein said ASGPR ligand comprises three GalNAc derivatives attached through a trivalent branched linker;
   [0554] (iii) 2′-F modifications at positions 1, 3, 5, 7, 9 to 11, and 13, and 2′-OMe modifications at positions 2, 4, 6, 8, 12, and 14 to 21; and
   [0555] (iv) phosphorothioate internucleotide linkages between nucleotide positions 1 and 2, and between nucleotide positions 2 and 3 (counting from the 5′ end);
[0556] and
[0557] (b) an antisense strand having:
   [0558] (i) a length of 23 nucleotides;
   [0559] (ii) 2′-OMe modifications at positions 1, 3, 5 to 7, 9, 11 to 13, 15, 17 to 19, and 21 to 23, and 2′-F modifications at positions 2, 4, 8, 10, 14, 16, and 20 (counting from the 5′ end); and
   [0560] (iii) phosphorothioate internucleotide linkages between nucleotide positions 1 and 2, between nucleotide positions 2 and 3, between nucleotide positions 21 and 22, and between nucleotide positions 22 and 23 (counting from the 5′ end);
      wherein the RNAi agents have a two nucleotide overhang at the 3′-end of the antisense strand, and a blunt end at the 5′-end of the antisense strand.

[0561] In another particular embodiment, a RNAi agent of the present invention comprises:
[0562] (a) a sense strand having:
   [0563] (i) a length of 21 nucleotides;
   [0564] (ii) an ASGPR ligand attached to the 3′-end, wherein said ASGPR ligand comprises three GalNAc derivatives attached through a trivalent branched linker;
   [0565] (iii) 2′-OMe modifications at positions 1, 2, 4, 6, 8, 12, 14, 15, 17, and 19 to 21, and 2′-F modifications at positions 3, 5, 7, 9 to 11, 13, 16, and 18; and
   [0566] (iv) phosphorothioate internucleotide linkages between nucleotide positions 1 and 2, and between nucleotide positions 2 and 3 (counting from the 5′ end);
[0567] and
[0568] (b) an antisense strand having:
   [0569] (i) a length of 25 nucleotides;
   [0570] (ii) 2′-OMe modifications at positions 1, 4, 6, 7, 9, 11 to 13, 15, 17, and 19 to 23, 2′-F modifications at positions 2, 3, 5, 8, 10, 14, 16, and 18, and deoxy-nucleotides (e.g. dT) at positions 24 and 25 (counting from the 5′ end); and
   [0571] (iii) phosphorothioate internucleotide linkages between nucleotide positions 1 and 2, between nucleotide positions 2 and 3, between nucleotide positions 21 and 22, and between nucleotide positions 22 and 23 (counting from the 5′ end);
      wherein the RNAi agents have a four nucleotide overhang at the 3′-end of the antisense strand, and a blunt end at the 5′-end of the antisense strand.

[0572] In another particular embodiment, a RNAi agent of the present invention comprises:
[0573] (a) a sense strand having:
   [0574] (i) a length of 21 nucleotides;
   [0575] (ii) an ASGPR ligand attached to the 3′-end, wherein said ASGPR ligand comprises three GalNAc derivatives attached through a trivalent branched linker;
   [0576] (iii) 2′-OMe modifications at positions 1 to 6, 8, and 12 to 21, and 2′-F modifications at positions 7, and 9 to 11; and
   [0577] (iv) phosphorothioate internucleotide linkages between nucleotide positions 1 and 2, and between nucleotide positions 2 and 3 (counting from the 5′ end);
[0578] and
[0579] (b) an antisense strand having:
   [0580] (i) a length of 23 nucleotides;
   [0581] (ii) 2′-OMe modifications at positions 1, 3 to 5, 7, 8, 10 to 13, 15, and 17 to 23, and 2′-F modifications at positions 2, 6, 9, 14, and 16 (counting from the 5′ end); and
   [0582] (iii) phosphorothioate internucleotide linkages between nucleotide positions 1 and 2, between nucleotide positions 2 and 3, between nucleotide positions 21 and 22, and between nucleotide positions 22 and 23 (counting from the 5′ end);
      wherein the RNAi agents have a two nucleotide overhang at the 3′-end of the antisense strand, and a blunt end at the 5′-end of the antisense strand.

[0583] In another particular embodiment, a RNAi agent of the present invention comprises:
[0584] (a) a sense strand having:
   [0585] (i) a length of 21 nucleotides;
   [0586] (ii) an ASGPR ligand attached to the 3′-end, wherein said ASGPR ligand comprises three GalNAc derivatives attached through a trivalent branched linker;
   [0587] (iii) 2′-OMe modifications at positions 1 to 6, 8, and 12 to 21, and 2′-F modifications at positions 7, and 9 to 11; and
   [0588] (iv) phosphorothioate internucleotide linkages between nucleotide positions 1 and 2, and between nucleotide positions 2 and 3 (counting from the 5′ end);
[0589] and
[0590] (b) an antisense strand having:
   [0591] (i) a length of 23 nucleotides;
   [0592] (ii) 2′-OMe modifications at positions 1, 3 to 5, 7, 10 to 13, 15, and 17 to 23, and 2′-F modifications at positions 2, 6, 8, 9, 14, and 16 (counting from the 5′ end); and
   [0593] (iii) phosphorothioate internucleotide linkages between nucleotide positions 1 and 2, between nucleotide positions 2 and 3, between nucleotide positions 21 and 22, and between nucleotide positions 22 and 23 (counting from the 5′ end);
      wherein the RNAi agents have a two nucleotide overhang at the 3′-end of the antisense strand, and a blunt end at the 5′-end of the antisense strand.

[0594] In another particular embodiment, a RNAi agent of the present invention comprises:
[0595] (a) a sense strand having:
   [0596] (i) a length of 19 nucleotides;
   [0597] (ii) an ASGPR ligand attached to the 3′-end, wherein said ASGPR ligand comprises three GalNAc derivatives attached through a trivalent branched linker;
   [0598] (iii) 2′-OMe modifications at positions 1 to 4, 6, and 10 to 19, and 2′-F modifications at positions 5, and 7 to 9; and
   [0599] (iv) phosphorothioate internucleotide linkages between nucleotide positions 1 and 2, and between nucleotide positions 2 and 3 (counting from the 5′ end);
[0600] and
[0601] (b) an antisense strand having:
   [0602] (i) a length of 21 nucleotides;
   [0603] (ii) 2′-OMe modifications at positions 1, 3 to 5, 7, 10 to 13, 15, and 17 to 21, and 2′-F modifications at positions 2, 6, 8, 9, 14, and 16 (counting from the 5′ end); and
   [0604] (iii) phosphorothioate internucleotide linkages between nucleotide positions 1 and 2, between nucleotide positions 2 and 3, between nucleotide positions 19 and 20, and between nucleotide positions 20 and 21 (counting from the 5′ end);
      wherein the RNAi agents have a two nucleotide overhang at the 3′-end of the antisense strand, and a blunt end at the 5′-end of the antisense strand.

[0605] In certain embodiments, the iRNA for use in the methods of the invention is an agent selected from agents listed in any one of Tables 4-5. These agents may further comprise a ligand.

### v. Antisense Polynucleotide Agents Comprising Motifs

[0606] In certain embodiments of the invention, at least one of the contiguous nucleotides of the antisense polynucleotide agents of the invention may be a modified nucleotide. In one embodiment, the modified nucleotide comprises one or more modified sugars. In other embodiments, the modified nucleotide comprises one or more modified nucleobases. In yet other embodiments, the modified nucleotide comprises one or more modified internucleoside linkages. In some embodiments, the modifications (sugar modifications, nucleobase modifications, or linkage modifications) define a pattern or motif. In one embodiment, the patterns of modifications of sugar moieties, internucleoside linkages, and nucleobases are each independent of one another.

[0607] Antisense polynucleotide agents having modified oligonucleotides arranged in patterns, or motifs may, for example, confer to the agents properties such as enhanced inhibitory activity, increased binding affinity for a target nucleic acid, or resistance to degradation by in vivo nucleases. For example, such agents may contain at least one region modified so as to confer increased resistance to nuclease degradation, increased cellular uptake, increased binding affinity for the target nucleic acid, or increased inhibitory activity. A second region of such agents may optionally serve as a substrate for the cellular endonuclease RNase H, which cleaves the RNA strand of an RNA:DNA duplex.

[0608] An exemplary antisense polynucleotide agent having modified oligonucleotides arranged in patterns, or motifs is a gapmer. In a “gapmer”, an internal region or “gap” having a plurality of linked nucleotides that supports RNaseH cleavage is positioned between two external flanking regions or “wings” having a plurality of linked nucleotides that are chemically distinct from the linked nucleotides of the internal region. The gap segment generally serves as the substrate for endonuclease cleavage, while the wing segments comprise modified nucleotides.

[0609] The three regions of a gapmer motif (the 5′-wing, the gap, and the 3′-wing) form a contiguous sequence of nucleotides and may be described as “X-Y-Z”, wherein “X” represents the length of the 5-wing, “Y” represents the length of the gap, and “Z” represents the length of the 3′-wing. In one embodiment, a gapmer described as “X-Y-Z” has a configuration such that the gap segment is positioned immediately adjacent to each of the 5′ wing segment and the 3′ wing segment. Thus, no intervening nucleotides exist between the 5′ wing segment and gap segment, or the gap segment and the 3′ wing segment. Any of the antisense compounds described herein can have a gapmer motif. In some embodiments, X and Z are the same, in other embodiments they are different.

[0610] In certain embodiments, the regions of a gapmer are differentiated by the types of modified nucleotides in the region. The types of modified nucleotides that may be used to differentiate the regions of a gapmer, in some embodiments, include β-D-ribonucleotides, β-D-deoxyribonucleotides, 2′-modified nucleotides, e.g., 2′-modified nucleotides (e.g., 2′-MOE, and 2′-O—CH3), and bicyclic sugar modified nucleotides (e.g., those having a 4′-(CH2)n-O-2′ bridge, where n=1 or n=2).

[0611] In one embodiment, at least some of the modified nucleotides of each of the wings may differ from at least some of the modified nucleotides of the gap. For example, at least some of the modified nucleotides of each wing that are closest to the gap (the 3′-most nucleotide of the 5′-wing and the 5′-most nucleotide of the 3-wing) differ from the modified nucleotides of the neighboring gap nucleotides, thus defining the boundary between the wings and the gap. In certain embodiments, the modified nucleotides within the gap are the same as one another. In certain embodiments, the gap includes one or more modified nucleotides that differ from the modified nucleotides of one or more other nucleotides of the gap.

[0612] The length of the 5′-wing (X) of a gapmer may be 1 to 6 nucleotides in length, e.g., 2 to 6, 2 to 5, 3 to 6, 3 to 5, 1 to 5, 1 to 4, 1 to 3, 2 to 4 nucleotides in length, e.g., 1, 2, 3, 4, 5, or 6 nucleotides in length.

[0613] The length of the 3′-wing (Z) of a gapmer may be 1 to 6 nucleotides in length, e.g., 2 to 6, 2-5, 3 to 6, 3 to 5, 1 to 5, 1 to 4, 1 to 3, 2 to 4 nucleotides in length, e.g., 1, 2, 3, 4, 5, or 6 nucleotides in length.

[0614] The length of the gap (Y) of a gapmer may be 5 to 14 nucleotides in length, e.g., 5 to 13, 5 to 12, 5 to 11, 5 to 10, 5 to 9, 5 to 8, 5 to 7, 5 to 6, 6 to 14, 6 to 13, 6 to 12, 6 to 11, 6 to 10, 6 to 9, 6 to 8, 6 to 7, 7 to 14, 7 to 13, 7 to 12, 7 to 11, 7 to 10, 7 to 9, 7 to 8, 8 to 14, 8 to 13, 8 to 12, 8 to 11, 8 to 10, 8 to 9, 9 to 14, 9 to 13, 9 to 12, 9 to 11, 9 to 10, 10 to 14, 10 to 13, 10 to 12, 10 to 11, 11 to 14, 11 to 13, 11 to 12, 12 to 14, 12 to 13, or 13 to 14 nucleotides in length, e.g., 5, 6, 7, 8, 9, 10, 11, 12, 13, or 14 nucleotides in length.

[0615] In some embodiments of the invention X consists of 2, 3, 4, 5 or 6 nucleotides, Y consists of 7, 8, 9, 10, 11, or 12 nucleotides, and Z consists of 2, 3, 4, 5 or 6 nucleotides. Such gapmers include (X-Y-Z) 2-7-2, 2-7-3, 2-7-4, 2-7-5, 2-7-6, 3-7-2, 3-7-3, 3-7-4, 3-7-5, 3-7-6, 4-7-3, 4-7-4, 4-7-5, 4-7-6, 5-7-3, 5-7-4, 5-7-5, 5-7-6, 6-7-3, 6-7-4, 6-7-5, 6-7-6, 3-7-3, 3-7-4, 3-7-5, 3-7-6, 4-7-3, 4-7-4, 4-7-5, 4-7-6, 5-7-3, 5-7-4, 5-7-5, 5-7-6, 6-7-3, 6-7-4, 6-7-5, 6-7-6, 2-8-2, 2-8-3, 2-8-4, 2-8-5, 2-8-6, 3-8-2, 3-8-3, 3-8-4, 3-8-5, 3-8-6, 4-8-3, 4-8-4, 4-8-5, 4-8-6, 5-8-3, 5-8-4, 5-8-5, 5-8-6, 6-8-3, 6-8-4, 6-8-5, 6-8-6, 2-9-2, 2-9-3, 2-9-4, 2-9-5, 2-9-6, 3-9-2, 3-9-3, 3-9-4, 3-9-5, 3-9-6, 4-9-3, 4-9-4, 4-9-5, 4-9-6, 5-9-3, 5-9-4, 5-9-5, 5-9-6, 6-9-3, 6-9-4, 6-9-5, 6-9-6, 2-10-2, 2-10-3, 2-10-4, 2-10-5, 2-10-6, 3-10-2, 3-10-3, 3-10-4, 3-10-5, 3-10-6, 4-10-3, 4-10-4, 4-10-5, 4-10-6, 5-10-3, 5-10-4, 5-10-5, 5-10-6, 6-10-3, 6-10-4, 6-10-5, 6-10-6, 2-11-2, 2-11-3, 2-11-4, 2-11-5, 2-11-6, 3-11-2, 3-11-3, 3-11-4, 3-11-5, 3-11-6, 4-11-3, 4-11-4, 4-11-5, 4-11-6, 5-11-3, 5-11-4, 5-11-5, 5-11-6, 6-11-3, 6-11-4, 6-11-5, 6-11-6, 2-12-2, 2-12-3, 2-12-4, 2-12-5, 2-12-6, 3-12-2, 3-12-3, 3-12-4, 3-12-5, 3-12-6, 4-12-3, 4-12-4, 4-12-5, 4-12-6, 5-12-3, 5-12-4, 5-12-5, 5-12-6, 6-12-3, 6-12-4, 6-12-5, or 6-12-6.

[0616] In some embodiments of the invention, antisense polynucleotide agents targeting INHBE include a 5-10-5 gapmer motif. In other embodiments of the invention, antisense polynucleotide agents targeting INHBE include a 4-10-4 gapmer motif. In another embodiment of the invention, antisense polynucleotide agents targeting INHBE include a 3-10-3 gapmer motif. In yet other embodiments of the invention, antisense polynucleotide agents targeting INHBE include a 2-10-2 gapmer motif.

[0617] The 5′-wing or 3′-wing of a gapmer may independently include 1-6 modified nucleotides, e.g., 1, 2, 3, 4, 5, or 6 modified nucleotides.

[0618] In some embodiment, the 5′-wing of a gapmer includes at least one modified nucleotide. In one embodiment, the 5′-wing of a gapmer comprises at least two modified nucleotides. In another embodiment, the 5′-wing of a gapmer comprises at least three modified nucleotides. In yet another embodiment, the 5′-wing of a gapmer comprises at least four modified nucleotides. In another embodiment, the 5′-wing of a gapmer comprises at least five modified nucleotides. In certain embodiments, each nucleotide of the 5′-wing of a gapmer is a modified nucleotide.

[0619] In some embodiments, the 3′-wing of a gapmer includes at least one modified nucleotide. In one embodiment, the 3′-wing of a gapmer comprises at least two modified nucleotides. In another embodiment, the 3′-wing of a gapmer comprises at least three modified nucleotides. In yet another embodiment, the 3′-wing of a gapmer comprises at least four modified nucleotides. In another embodiment, the 3′-wing of a gapmer comprises at least five modified nucleotides. In certain embodiments, each nucleotide of the 3′-wing of a gapmer is a modified nucleotide.

[0620] In certain embodiments, the regions of a gapmer are differentiated by the types of sugar moieties of the nucleotides. In one embodiment, the nucleotides of each distinct region comprise uniform sugar moieties. In other embodiments, the nucleotides of each distinct region comprise different sugar moieties. In certain embodiments, the sugar nucleotide modification motifs of the two wings are the same as one another. In certain embodiments, the sugar nucleotide modification motifs of the 5′-wing differs from the sugar nucleotide modification motif of the 3′-wing.

[0621] The 5′-wing of a gapmer may include 1-6 modified nucleotides, e.g., 1, 2, 3, 4, 5, or 6 modified nucleotides.

[0622] In one embodiment, at least one modified nucleotide of the 5′-wing of a gapmer is a bicyclic nucleotide, such as a constrained ethyl nucleotide, or an LNA. In another embodiment, the 5′-wing of a gapmer includes 2, 3, 4, or 5 bicyclic nucleotides. In some embodiments, each nucleotide of the 5′-wing of a gapmer is a bicyclic nucleotide.

[0623] In one embodiment, the 5′-wing of a gapmer includes at least 1, 2, 3, 4, or 5 constrained ethyl nucleotides. In some embodiments, each nucleotide of the 5′-wing of a gapmer is a constrained ethyl nucleotide.

[0624] In one embodiment, the 5′-wing of a gapmer comprises at least one LNA nucleotide. In another embodiment, the 5′-wing of a gapmer includes 2, 3, 4, or 5 LNA nucleotides. In other embodiments, each nucleotide of the 5′-wing of a gapmer is an LNA nucleotide.

[0625] In certain embodiments, at least one modified nucleotide of the 5′-wing of a gapmer is a non-bicyclic modified nucleotide, e.g., a 2′-substituted nucleotide. A “2′-substituted nucleotide” is a nucleotide comprising a modification at the 2′-position which is other than H or OH, such as a 2′-OMe nucleotide, or a 2′-MOE nucleotide. In one embodiment, the 5′-wing of a gapmer comprises 2, 3, 4, or 5 2′-substituted nucleotides. In one embodiment, each nucleotide of the 5′-wing of a gapmer is a 2′-substituted nucleotide.

[0626] In one embodiment, the 5′-wing of a gapmer comprises at least one 2′-OMe nucleotide. In one embodiment, the 5′-wing of a gapmer comprises at least 2, 3, 4, or 5 2′-OMe nucleotides. In one embodiment, each of the nucleotides of the 5′-wing of a gapmer comprises a 2′-OMe nucleotide.

[0627] In one embodiment, the 5′-wing of a gapmer comprises at least one 2′-MOE nucleotide. In one embodiment, the 5′-wing of a gapmer comprises at least 2, 3, 4, or 5 2′-MOE nucleotides. In one embodiment, each of the nucleotides of the 5′-wing of a gapmer comprises a 2′-MOE nucleotide.

[0628] In certain embodiments, the 5′-wing of a gapmer comprises at least one 2′-deoxynucleotide. In certain embodiments, each nucleotide of the 5′-wing of a gapmer is a 2′-deoxynucleotide. In a certain embodiments, the 5′-wing of a gapmer comprises at least one ribonucleotide. In certain embodiments, each nucleotide of the 5′-wing of a gapmer is a ribonucleotide.

[0629] The 3′-wing of a gapmer may include 1-6 modified nucleotides, e.g., 1, 2, 3, 4, 5, or 6 modified nucleotides.

[0630] In one embodiment, at least one modified nucleotide of the 3′-wing of a gapmer is a bicyclic nucleotide, such as a constrained ethyl nucleotide, or an LNA. In another embodiment, the 3′-wing of a gapmer includes 2, 3, 4, or 5 bicyclic nucleotides. In some embodiments, each nucleotide of the 3′-wing of a gapmer is a bicyclic nucleotide.

[0631] In one embodiment, the 3′-wing of a gapmer includes at least one constrained ethyl nucleotide. In another embodiment, the 3′-wing of a gapmer includes 2, 3, 4, or 5 constrained ethyl nucleotides. In some embodiments, each nucleotide of the 3′-wing of a gapmer is a constrained ethyl nucleotide.

[0632] In one embodiment, the 3′-wing of a gapmer comprises at least one LNA nucleotide. In another embodiment, the 3′-wing of a gapmer includes 2, 3, 4, or 5 LNA nucleotides. In other embodiments, each nucleotide of the 3′-wing of a gapmer is an LNA nucleotide.

[0633] In certain embodiments, at least one modified nucleotide of the 3′-wing of a gapmer is a non-bicyclic modified nucleotide, e.g., a 2′-substituted nucleotide. In one embodiment, the 3′-wing of a gapmer comprises 2, 3, 4, or 5 2′-substituted nucleotides. In one embodiment, each nucleotide of the 3′-wing of a gapmer is a 2′-substituted nucleotide.

[0634] In one embodiment, the 3′-wing of a gapmer comprises at least one 2′-OMe nucleotide. In one embodiment, the 3′-wing of a gapmer comprises at least 2, 3, 4, or 5 2′-OMe nucleotides. In one embodiment, each of the nucleotides of the 3′-wing of a gapmer comprises a 2′-OMe nucleotide.

[0635] In one embodiment, the 3′-wing of a gapmer comprises at least one 2′-MOE nucleotide. In one embodiment, the 3′-wing of a gapmer comprises at least 2, 3, 4, or 5 2′-MOE nucleotides. In one embodiment, each of the nucleotides of the 3′-wing of a gapmer comprises a 2′-MOE nucleotide.

[0636] In certain embodiments, the 3′-wing of a gapmer comprises at least one 2′-deoxynucleotide. In certain embodiments, each nucleotide of the 3′-wing of a gapmer is a 2′-deoxynucleotide. In a certain embodiments, the 3′-wing of a gapmer comprises at least one ribonucleotide. In certain embodiments, each nucleotide of the 3′-wing of a gapmer is a ribonucleotide.

[0637] The gap of a gapmer may include 5-14 modified nucleotides, e.g., 5, 6, 7, 8, 9, 10, 11, 12, 13, or 14 modified nucleotides.

[0638] In one embodiment, the gap of a gapmer comprises at least one 5-methylcytosine. In one embodiment, the gap of a gapmer comprises at least 2, 3, 4, 5, 6, 7, 8, 9, 10, 11, 12, or 13 5-methylcytosines. In one embodiment, all of the nucleotides of the gap of a gapmer are 5-methylcytosines.

[0639] In one embodiment, the gap of a gapmer comprises at least one 2′-deoxynucleotide. In one embodiment, the gap of a gapmer comprises at least 2, 3, 4, 5, 6, 7, 8, 9, 10, 11, 12, or 13 2′-deoxynucleotides. In one embodiment, all of the nucleotides of the gap of a gapmer are 2′-deoxynucleotides.

[0640] A gapmer may include one or more modified internucleotide linkages. In some embodiments, a gapmer includes one or more phosphodiester internucleotide linkages. In other embodiments, a gapmer includes one or more phosphorothioate internucleotide linkages.

[0641] In one embodiment, each nucleotide of a 5′-wing of a gapmer are linked via a phosphorothioate internucleotide linkage. In another embodiment, each nucleotide of a 3′-wing of a gapmer are linked via a phosphorothioate internucleotide linkage. In yet another embodiment, each nucleotide of a gap segment of a gapmer is linked via a phosphorothioate internucleotide linkage. In one embodiment, all of the nucleotides in a gapmer are linked via phosphorothioate internucleotide linkages.

[0642] In one embodiment, an antisense polynucleotide agent targeting an INHBE gene comprises a gap segment of ten 2′-deoxyribonucleotides positioned immediately adjacent to and between a 5′-wing segment comprising five nucleotides and a 3′-wing segment comprising 5 nucleotides.

[0643] In another embodiment, an antisense polynucleotide agent targeting an INHBE gene comprises a gap segment of ten 2′-deoxyribonucleotides positioned immediately adjacent to and between a 5′-wing segment comprising four nucleotides and a 3′-wing segment comprising four nucleotides.

[0644] In another embodiment, an antisense polynucleotide agent targeting an INHBE gene comprises a gap segment of ten 2′-deoxyribonucleotides positioned immediately adjacent to and between a 5′-wing segment comprising three nucleotides and a 3′-wing segment comprising three nucleotides.

[0645] In another embodiment, an antisense polynucleotide agent targeting an INHBE gene comprises a gap segment of ten 2′-deoxyribonucleotides positioned immediately adjacent to and between a 5′-wing segment comprising two nucleotides and a 3′-wing segment comprising two nucleotides.

[0646] In one embodiment, each nucleotide of a 5-wing flanking a gap segment of 10 2′-deoxyribonucleotides comprises a modified nucleotide. In another embodiment, each nucleotide of a 3-wing flanking a gap segment of 10 2′-deoxyribonucleotides comprises a modified nucleotide. In one embodiment, each of the modified 5′-wing nucleotides and each of the modified 3′-wing nucleotides comprise a 2′-sugar modification. In one embodiment, the 2′-sugar modification is a 2′-OMe modification. In another embodiment, the 2′-sugar modification is a 2′-MOE modification. In one embodiment, each of the modified 5′-wing nucleotides and each of the modified 3′-wing nucleotides comprise a bicyclic nucleotide. In one embodiment, the bicyclic nucleotide is a constrained ethyl nucleotide. In another embodiment, the bicyclic nucleotide is an LNA nucleotide. In one embodiment, each cytosine in an antisense polynucleotide agent targeting an INHBE gene is a 5-methylcytosine.

[0647] In one embodiment, an antisense polynucleotide agent targeting an INHBE gene comprises a gap segment of ten 2′-deoxyribonucleotides positioned immediately adjacent to and between a 5′-wing segment comprising five nucleotides comprising a 2′OMe modification and a 3′-wing segment comprising five nucleotides comprising a 2′OMe modification, wherein each internucleotide linkage of the agent is a phosphorothioate linkage. In one embodiment, each cytosine of the agent is a 5-methylcytosine. In some embodiments, the agent further comprises a ligand.

[0648] In one embodiment, an antisense polynucleotide agent targeting an INHBE gene comprises a gap segment of ten 2′-deoxyribonucleotides positioned immediately adjacent to and between a 5′-wing segment comprising five nucleotides comprising a 2′MOE modification and a 3′-wing segment comprising five nucleotides comprising a 2′MOE modification, wherein each internucleotide linkage of the agent is a phosphorothioate linkage. In one embodiment, each cytosine of the agent is a 5-methylcytosine. In some embodiments, the agent further comprises a ligand.

[0649] In one embodiment, an antisense polynucleotide agent targeting an INHBE gene comprises a gap segment of ten 2′-deoxyribonucleotides positioned immediately adjacent to and between a 5′-wing segment comprising five constrained ethyl nucleotides and a 3′-wing segment comprising five constrained ethyl nucleotides, wherein each internucleotide linkage of the agent is a phosphorothioate linkage. In some embodiments, each cytosine of the agent is a 5-methylcytosine.

[0650] In one embodiment, an antisense polynucleotide agent targeting an INHBE gene comprises a gap segment of ten 2′-deoxyribonucleotides positioned immediately adjacent to and between a 5′-wing segment comprising five LNA nucleotides and a 3′-wing segment comprising five LNA nucleotides, wherein each internucleotide linkage of the agent is a phosphorothioate linkage. In some embodiments, each cytosine of the agent is a 5-methylcytosine.

[0651] In one embodiment, an antisense polynucleotide agent targeting an INHBE gene comprises a gap segment of ten 2′-deoxyribonucleotides positioned immediately adjacent to and between a 5′-wing segment comprising four nucleotides comprising a 2′OMe modification and a 3′-wing segment comprising four nucleotides comprising a 2′OMe modification, wherein each internucleotde linkage of the agent is a phosphorothioate linkage. In some embodiments, each cytosine of the agent is a 5-methylcytosine.

[0652] In one embodiment, an antisense polynucleotide agent targeting an INHBE gene comprises a gap segment of ten 2′-deoxyribonucleotides positioned immediately adjacent to and between a 5′-wing segment comprising four nucleotides comprising a 2′MOE modification and a 3′-wing segment comprising four nucleotides comprising a 2′MOE modification, wherein each internucleotide linkage of the agent is a phosphorothioate linkage. In some embodiments, each cytosine of the agent is a 5-methylcytosine.

[0653] In one embodiment, an antisense polynucleotide agent targeting an INHBE gene comprises a gap segment of ten 2′-deoxyribonucleotides positioned immediately adjacent to and between a 5′-wing segment comprising four constrained ethyl nucleotides and a 3′-wing segment comprising four constrained ethyl nucleotides, wherein each internucleoitde linkage of the agent is a phosphorothioate linkage. In some embodiments, each cytosine of the agent is a 5-methylcytosine.

[0654] In one embodiment, an antisense polynucleotide agent targeting an INHBE gene comprises a gap segment of ten 2′-deoxyribonucleotides positioned immediately adjacent to and between a 5′-wing segment comprising four LNA nucleotides and a 3′-wing segment comprising four LNA nucleotides, wherein each internucleotide linkage of the agent is a phosphorothioate linkage. In some embodiments, each cytosine of the agent is a 5-methylcytosine.

[0655] In one embodiment, an antisense polynucleotide agent targeting an INHBE gene comprises a gap segment of ten 2′-deoxyribonucleotides positioned immediately adjacent to and between a 5′-wing segment comprising three nucleotides comprising a 2′OMe modification and a 3′-wing segment comprising three nucleotides comprising a 2′OMe modification, wherein each internucleotide linkage of the agent is a phosphorothioate linkage. In some embodiments, each cytosine of the agent is a 5-methylcytosine.

[0656] In one embodiment, an antisense polynucleotide agent targeting an INHBE gene comprises a gap segment of ten 2′-deoxyribonucleotides positioned immediately adjacent to and between a 5′-wing segment comprising three nucleotides comprising a 2′MOE modification and a 3′-wing segment comprising three nucleotides comprising a 2′MOE modification, wherein each internucleotide linkage of the agent is a phosphorothioate linkage. In some embodiments, each cytosine of the agent is a 5-methylcytosine.

[0657] In one embodiment, an antisense polynucleotide agent targeting an INHBE gene comprises a gap segment of ten 2′-deoxyribonucleotides positioned immediately adjacent to and between a 5′-wing segment comprising three constrained ethyl nucleotides and a 3′-wing segment comprising three constrained ethyl nucleotides, wherein each internucleoitde linkage of the agent is a phosphorothioate linkage. In some embodiments, each cytosine of the agent is a 5-methylcytosine.

[0658] In one embodiment, an antisense polynucleotide agent targeting an INHBE gene comprises a gap segment of ten 2′-deoxyribonucleotides positioned immediately adjacent to and between a 5′-wing segment comprising three LNA nucleotides and a 3′-wing segment comprising three LNA nucleotides, wherein each internucleotide linkage of the agent is a phosphorothioate linkage. In some embodiments, each cytosine of the agent is a 5-methylcytosine.

[0659] In one embodiment, an antisense polynucleotide agent targeting an INHBE gene comprises a gap segment of ten 2′-deoxyribonucleotides positioned immediately adjacent to and between a 5′-wing segment comprising two nucleotides comprising a 2′OMe modification and a 3′-wing segment comprising two nucleotides comprising a 2′OMe modification, wherein each internucleotde linkage of the agent is a phosphorothioate linkage. In some embodiments, each cytosine of the agent is a 5-methylcytosine.

[0660] In one embodiment, an antisense polynucleotide agent targeting an INHBE gene comprises a gap segment of ten 2′-deoxyribonucleotides positioned immediately adjacent to and between a 5′-wing segment comprising two nucleotides comprising a 2′MOE modification and a 3′-wing segment comprising two nucleotides comprising a 2′MOE modification, wherein each internucleotide linkage of the agent is a phosphorothioate linkage. In some embodiments, each cytosine of the agent is a 5-methylcytosine.

[0661] In one embodiment, an antisense polynucleotide agent targeting an INHBE gene comprises a gap segment of ten 2′-deoxyribonucleotides positioned immediately adjacent to and between a 5′-wing segment comprising two constrained ethyl nucleotides and a 3′-wing segment comprising two constrained ethyl nucleotides, wherein each internucleoitde linkage of the agent is a phosphorothioate linkage. In some embodiments, each cytosine of the agent is a 5-methylcytosine.

[0662] In one embodiment, an antisense polynucleotide agent targeting an INHBE gene comprises a gap segment of ten 2′-deoxyribonucleotides positioned immediately adjacent to and between a 5′-wing segment comprising two LNA nucleotides and a 3′-wing segment comprising two LNA nucleotides, wherein each internucleotide linkage of the agent is a phosphorothioate linkage. In some embodiments, each cytosine of the agent is a 5-methylcytosine.

[0663] Further gapmer designs suitable for use in the agents, compositions, and methods of the invention are disclosed in, for example, U.S. Pat. Nos. 7,687,617 and 8,580,756; U.S. Patent Publication Nos. 20060128646, 20090209748, 20140128586, 20140128591, 20100210712, and 20080015162A1; and International Publication No. WO 2013/159108, the entire content of each of which are incorporated herein by reference.

### vi. Modulators Conjugated to Ligands

[0664] Another modification of the modulators, e.g., oligonucleotides, e.g., dsRNA agents, antisense polynucleotide agents, guideRNAs effecting ADAR editing or guideRNAs effecting CRISPR editing, of the invention involves chemically linking to the modulator to one or more ligands, moieties or conjugates that enhance the activity, cellular distribution, or cellular uptake of the oligonucleotide e.g., into a cell. Such moieties include but are not limited to lipid moieties such as a cholesterol moiety (Letsinger et al., Proc. Natl. Acid. Sci. USA, 1989, 86: 6553-6556). In other embodiments, the ligand is cholic acid (Manoharan et al., Biorg. Med. Chem. Let., 1994, 4:1053-1060), a thioether, e.g., beryl-S-tritylthiol (Manoharan et al., Ann. N. Y. Acad. Sci., 1992, 660:306-309; Manoharan et al., Biorg. Med. Chem. Let., 1993, 3:2765-2770), a thiocholesterol (Oberhauser et al., Nucl. Acids Res., 1992, 20:533-538), an aliphatic chain, e.g., dodecandiol or undecyl residues (Saison-Behmoaras et al., EMBO J, 1991, 10:1111-1118; Kabanov et al., FEBS Lett., 1990, 259:327-330; Svinarchuk et al., Biochimie, 1993, 75:49-54), a phospholipid, e.g., di-hexadecyl-rac-glycerol or triethyl-ammonium 1,2-di-O-hexadecyl-rac-glycero-3-phosphonate (Manoharan et al., Tetrahedron Lett., 1995, 36:3651-3654; Shea et al., Nucl. Acids Res., 1990, 18:3777-3783), a polyamine or a polyethylene glycol chain (Manoharan et al., Nucleosides & Nucleotides, 1995, 14:969-973), or adamantane acetic acid (Manoharan et al., Tetrahedron Lett., 1995, 36:3651-3654), a palmityl moiety (Mishra et al., Biochim. Biophys. Acta, 1995, 1264:229-237), or an octadecylamine or hexylamino-carbonyloxycholesterol moiety (Crooke et al., J. Pharmacol. Exp. Ther., 1996, 277:923-937).

[0665] In certain embodiments, a ligand alters the distribution, targeting, or lifetime of an oligonucleotide into which it is incorporated. In some embodiments a ligand provides an enhanced affinity for a selected target, e.g., molecule, cell or cell type, compartment, e.g., a cellular or organ compartment, tissue, organ or region of the body, as, e.g., compared to a species absent such a ligand. In some embodiments, ligands do not take part in duplex pairing in a duplexed nucleic acid.

[0666] Ligands can include a naturally occurring substance, such as a protein (e.g., human serum albumin (HSA), low-density lipoprotein (LDL), or globulin); carbohydrate (e.g., a dextran, pullulan, chitin, chitosan, inulin, cyclodextrin, N-acetylglucosamine, N-acetylgalactosamine, or hyaluronic acid); or a lipid. The ligand can also be a recombinant or synthetic molecule, such as a synthetic polymer, e.g., a synthetic polyamino acid. Examples of polyamino acids include polyamino acid is a polylysine (PLL), poly L-aspartic acid, poly L-glutamic acid, styrene-maleic acid anhydride copolymer, poly(L-lactide-co-glycolied) copolymer, divinyl ether-maleic anhydride copolymer, N-(2-hydroxypropyl)methacrylamide copolymer (HMPA), polyethylene glycol (PEG), polyvinyl alcohol (PVA), polyurethane, poly(2-ethylacryllic acid), N-isopropylacrylamide polymers, or polyphosphazine. Example of polyamines include: polyethylenimine, polylysine (PLL), spermine, spermidine, polyamine, pseudopeptide-polyamine, peptidomimetic polyamine, dendrimer polyamine, arginine, amidine, protamine, cationic lipid, cationic porphyrin, quaternary salt of a polyamine, or an alpha helical peptide.

[0667] Ligands can also include targeting groups, e.g., a cell or tissue targeting agent, e.g., a lectin, glycoprotein, lipid or protein, e.g., an antibody, that binds to a specified cell type such as a kidney cell. A targeting group can be a thyrotropin, melanotropin, lectin, glycoprotein, surfactant protein A, Mucin carbohydrate, multivalent lactose, multivalent galactose, N-acetyl-galactosamine, N-acetyl-glucosamine multivalent mannose, multivalent fucose, glycosylated polyaminoacids, multivalent galactose, transferrin, bisphosphonate, polyglutamate, polyaspartate, a lipid, cholesterol, a steroid, bile acid, folate, vitamin B12, vitamin A, biotin, or an RGD peptide or RGD peptide mimetic. In certain embodiments, the ligand is a multivalent galactose, e.g., an N-acetyl-galactosamine.

[0668] Other examples of ligands include dyes, intercalating agents (e.g. acridines), cross-linkers (e.g. psoralene, mitomycin C), porphyrins (TPPC4, texaphyrin, Sapphyrin), polycyclic aromatic hydrocarbons (e.g., phenazine, dihydrophenazine), artificial endonucleases (e.g. EDTA), lipophilic molecules, e.g., cholesterol, cholic acid, adamantane acetic acid, 1-pyrene butyric acid, dihydrotestosterone, 1,3-Bis-O(hexadecyl)glycerol, geranyloxyhexyl group, hexadecylglycerol, borneol, menthol, 1,3-propanediol, heptadecyl group, palmitic acid, myristic acid,O3-(oleoyl)lithocholic acid, 03-(oleoyl)cholenic acid, dimethoxytrityl, or phenoxazine) and peptide conjugates (e.g., antennapedia peptide, Tat peptide), alkylating agents, phosphate, amino, mercapto, PEG (e.g., PEG-40K), MPEG, [MPEG]₂, polyamino, alkyl, substituted alkyl, radiolabeled markers, enzymes, haptens (e.g. biotin), transport/absorption facilitators (e.g., aspirin, vitamin E, folic acid), synthetic ribonucleases (e.g., imidazole, bisimidazole, histamine, imidazole clusters, acridine-imidazole conjugates, Eu3+ complexes of tetraazamacrocycles), dinitrophenyl, HRP, or AP.

[0669] Ligands can be proteins, e.g., glycoproteins, or peptides, e.g., molecules having a specific affinity for a co-ligand, or antibodies e.g., an antibody, that binds to a specified cell type such as a hepatic cell. Ligands can also include hormones and hormone receptors. They can also include non-peptidic species, such as lipids, lectins, carbohydrates, vitamins, cofactors, multivalent lactose, multivalent galactose, N-acetyl-galactosamine, N-acetyl-glucosamine multivalent mannose, or multivalent fucose. The ligand can be, for example, a lipopolysaccharide, an activator of p38 MAP kinase, or an activator of NF-κB.

[0670] The ligand can be a substance, e.g., a drug, which can increase the uptake of the modulator, e.g., oligonucleotide, e.g., dsRNA agent or antisense polynucleotide agent, into the cell, for example, by disrupting the cell's cytoskeleton, e.g., by disrupting the cell's microtubules, microfilaments, or intermediate filaments. The drug can be, for example, taxol, vincristine, vinblastine, cytochalasin, nocodazole, japlakinolide, latrunculin A, phalloidin, swinholide A, indanocine, or myoservin.

[0671] In some embodiments, a ligand attached to an oligonucleotide as described herein acts as a pharmacokinetic modulator (PK modulator). PK modulators include lipophiles, bile acids, steroids, phospholipid analogues, peptides, protein binding agents, PEG, vitamins, etc. Exemplary PK modulators include, but are not limited to, cholesterol, fatty acids, cholic acid, lithocholic acid, dialkylglycerides, diacylglyceride, phospholipids, sphingolipids, naproxen, ibuprofen, vitamin E, biotin. Oligonucleotides that comprise a number of phosphorothioate linkages are also known to bind to serum protein, thus short oligonucleotides, e.g., oligonucleotides of about 5 bases, 10 bases, 15 bases, or 20 bases, comprising multiple of phosphorothioate linkages in the backbone are also amenable to the present invention as ligands (e.g. as PK modulating ligands). In addition, aptamers that bind serum components (e.g. serum proteins) are also suitable for use as PK modulating ligands in the embodiments described herein.

[0672] Ligand-conjugated oligonucleotides of the invention may be synthesized by the use of an oligonucleotide that bears a pendant reactive functionality, such as that derived from the attachment of a linking molecule onto the oligonucleotide (described below). This reactive oligonucleotide may be reacted directly with commercially-available ligands, ligands that are synthesized bearing any of a variety of protecting groups, or ligands that have a linking moiety attached thereto.

[0673] The oligonucleotides used in the conjugates of the present invention may be conveniently and routinely made through the well-known technique of solid-phase synthesis. Equipment for such synthesis is sold by several vendors including, for example, Applied Biosystems® (Foster City, Calif.). Any other methods for such synthesis known in the art may additionally or alternatively be employed. It is also known to use similar techniques to prepare other oligonucleotides, such as the phosphorothioates and alkylated derivatives.

[0674] In the ligand-conjugated oligonucleotides and ligand-molecule bearing sequence-specific linked nucleosides of the present invention, the oligonucleotides and oligonucleosides may be assembled on a suitable DNA synthesizer utilizing standard nucleotide or nucleoside precursors, or nucleotide or nucleoside conjugate precursors that already bear the linking moiety, ligand-nucleotide or nucleoside-conjugate precursors that already bear the ligand molecule, or non-nucleoside ligand-bearing building blocks.

[0675] When using nucleotide-conjugate precursors that already bear a linking moiety, the synthesis of the sequence-specific linked nucleosides is typically completed, and the ligand molecule is then reacted with the linking moiety to form the ligand-conjugated oligonucleotide. In some embodiments, the oligonucleotides or linked nucleosides of the present invention are synthesized by an automated synthesizer using phosphoramidites derived from ligand-nucleoside conjugates in addition to the standard phosphoramidites and non-standard phosphoramidites that are commercially available and routinely used in oligonucleotide synthesis.

### A. Lipid Conjugates

[0676] In certain embodiments, the ligand or conjugate is a lipid or lipid-based molecule. In one embodiment, such a lipid or lipid-based molecule binds a serum protein, e.g., human serum albumin (HSA). An HSA binding ligand allows for distribution of the conjugate to a target tissue, e.g., a non-kidney target tissue of the body. For example, the target tissue can be the liver, including parenchymal cells of the liver. Other molecules that can bind HSA can also be used as ligands. For example, naproxen or aspirin can be used. A lipid or lipid-based ligand can (a) increase resistance to degradation of the conjugate, (b) increase targeting or transport into a target cell or cell membrane, or (c) can be used to adjust binding to a serum protein, e.g., HSA.

[0677] A lipid based ligand can be used to inhibit, e.g., control the binding of the conjugate to a target tissue. For example, a lipid or lipid-based ligand that binds to HSA more strongly will be less likely to be targeted to the kidney and therefore less likely to be cleared from the body. A lipid or lipid-based ligand that binds to HSA less strongly can be used to target the conjugate to the kidney.

[0678] In certain embodiments, the lipid based ligand binds HSA. In one embodiment, it binds HSA with a sufficient affinity such that the conjugate will be distributed to a non-kidney tissue. However, it is preferred that the affinity not be so strong that the HSA-ligand binding cannot be reversed.

[0679] In other embodiments, the lipid based ligand binds HSA weakly or not at all. In one embodiment, the conjugate will be distributed to the kidney. Other moieties that target to kidney cells can also be used in place of, or in addition to, the lipid based ligand.

[0680] In another aspect, the ligand is a moiety, e.g., a vitamin, which is taken up by a target cell, e.g., a proliferating cell. These are particularly useful for treating disorders characterized by unwanted cell proliferation, e.g., of the malignant or non-malignant type, e.g., cancer cells. Exemplary vitamins include vitamin A, E, and K. Other exemplary vitamins include are B vitamin, e.g., folic acid, B12, riboflavin, biotin, pyridoxal or other vitamins or nutrients taken up by target cells such as liver cells. Also included are HSA and low density lipoprotein (LDL).

### B. Cell Permeation Agents

[0681] In another aspect, the ligand is a cell-permeation agent, such as, a helical cell-permeation agent. In one embodiment, the agent is amphipathic. An exemplary agent is a peptide such as tat or antennopedia. If the agent is a peptide, it can be modified, including a peptidylmimetic, invertomers, non-peptide or pseudo-peptide linkages, and use of D-amino acids. In one embodiment, the helical agent is an alpha-helical agent, which has a lipophilic and a lipophobic phase.

[0682] The ligand can be a peptide or peptidomimetic. A peptidomimetic (also referred to herein as an oligopeptidomimetic) is a molecule capable of folding into a defined three-dimensional structure similar to a natural peptide. The attachment of peptide and peptidomimetics to iRNA agents can affect pharmacokinetic distribution of the iRNA, such as by enhancing cellular recognition and absorption. The peptide or peptidomimetic moiety can be about 5-50 amino acids long, e.g., about 5, 10, 15, 20, 25, 30, 35, 40, 45, or 50 amino acids long.

[0683] A peptide or peptidomimetic can be, for example, a cell permeation peptide, cationic peptide, amphipathic peptide, or hydrophobic peptide (e.g., consisting primarily of Tyr, Trp, or Phe). The peptide moiety can be a dendrimer peptide, constrained peptide or crosslinked peptide. In another alternative, the peptide moiety can include a hydrophobic membrane translocation sequence (MTS). An exemplary hydrophobic MTS-containing peptide is RFGF having the amino acid sequence AAVALLPAVLLALLAP (SEQ ID NO: 14). An RFGF analogue (e.g., amino acid sequence AALLPVLLAAP (SEQ ID NO:15) containing a hydrophobic MTS can also be a targeting moiety. The peptide moiety can be a “delivery” peptide, which can carry large polar molecules including peptides, oligonucleotides, and protein across cell membranes. For example, sequences from the HIV Tat protein (GRKKRRQRRRPPQ (SEQ ID NO:16) and the Drosophila Antennapedia protein (RQIKIWFQNRRMKWKK (SEQ ID NO:17) have been found to be capable of functioning as delivery peptides. A peptide or peptidomimetic can be encoded by a random sequence of DNA, such as a peptide identified from a phage-display library, or one-bead-one-compound (OBOC) combinatorial library (Lam et al., Nature, 354:82-84, 1991). Examples of a peptide or peptidomimetic tethered to a dsRNA agent via an incorporated monomer unit for cell targeting purposes is an arginine-glycine-aspartic acid (RGD)-peptide, or RGD mimic. A peptide moiety can range in length from about 5 amino acids to about 40 amino acids. The peptide moieties can have a structural modification, such as to increase stability or direct conformational properties. Any of the structural modifications described below can be utilized.

[0684] An RGD peptide for use in the compositions and methods of the invention may be linear or cyclic, and may be modified, e.g., glycosylated or methylated, to facilitate targeting to a specific tissue(s). RGD-containing peptides and peptidiomimemtics may include D-amino acids, as well as synthetic RGD mimics. In addition to RGD, one can use other moieties that target the integrin ligand, e.g., PECAM-1 or VEGF.

[0685] A “cell permeation peptide” is capable of permeating a cell, e.g., a microbial cell, such as a bacterial or fungal cell, or a mammalian cell, such as a human cell. A microbial cell-permeating peptide can be, for example, an α-helical linear peptide (e.g., LL-37 or Ceropin P1), a disulfide bond-containing peptide (e.g., α-defensin, β-defensin or bactenecin), or a peptide containing only one or two dominating amino acids (e.g., PR-39 or indolicidin). A cell permeation peptide can also include a nuclear localization signal (NLS). For example, a cell permeation peptide can be a bipartite amphipathic peptide, such as MPG, which is derived from the fusion peptide domain of HIV-1 gp41 and the NLS of SV40 large T antigen (Simeoni et al., Nucl. Acids Res. 31:2717-2724, 2003).

### C. Carbohydrate Conjugates

[0686] In some embodiments of the compositions and methods of the invention, an oligonucleotide, e.g., dsRNA agent or antisense polynucleotide agent, further comprises a carbohydrate. The carbohydrate conjugated oligonucleotide is advantageous for the in vivo delivery of nucleic acids, as well as compositions suitable for in vivo therapeutic use, as described herein. As used herein, “carbohydrate” refers to a compound which is either a carbohydrate per se made up of one or more monosaccharide units having at least 6 carbon atoms (which can be linear, branched or cyclic) with an oxygen, nitrogen or sulfur atom bonded to each carbon atom; or a compound having as a part thereof a carbohydrate moiety made up of one or more monosaccharide units each having at least six carbon atoms (which can be linear, branched or cyclic), with an oxygen, nitrogen or sulfur atom bonded to each carbon atom. Representative carbohydrates include the sugars (mono-, di-, tri-, and oligosaccharides containing from about 4, 5, 6, 7, 8, or 9 monosaccharide units), and polysaccharides such as starches, glycogen, cellulose and polysaccharide gums. Specific monosaccharides include C5 and above (e.g., C5, C6, C7, or C8) sugars; di- and trisaccharides include sugars having two or three monosaccharide units (e.g., C5, C6, C7, or C8).

[0687] In certain embodiments, a carbohydrate conjugate for use in the compositions and methods of the invention is a monosaccharide.

[0688] In certain embodiments, the monosaccharide is an N-acetylgalactosamine (GalNAc). GalNAc conjugates, which comprise one or more N-acetylgalactosamine (GalNAc) derivatives, are described, for example, in U.S. Pat. No. 8,106,022, the entire content of which is hereby incorporated herein by reference.

[0689] In some embodiments, the GalNAc conjugate serves as a ligand that targets the iRNA to particular cells. In some embodiments, the GalNAc conjugate targets the iRNA to liver cells, e.g., by serving as a ligand for the asialoglycoprotein receptor of liver cells (e.g., hepatocytes).

[0690] In some embodiments, the carbohydrate conjugate comprises one or more GalNAc derivatives. The GalNAc derivatives may be attached via a linker, e.g., a bivalent or trivalent branched linker. In some embodiments the GalNAc conjugate is conjugated to the 3′ end of the sense strand. In some embodiments, the GalNAc conjugate is conjugated to the oligonucleotide agent (e.g., to the 3′ end of the sense strand) via a linker, e.g., a linker as described herein. In some embodiments the GalNAc conjugate is conjugated to the 5′ end of the sense strand. In some embodiments, the GalNAc conjugate is conjugated to the iRNA agent (e.g., to the 5′ end of the sense strand) via a linker, e.g., a linker as described herein.

[0691] In certain embodiments of the invention, the GalNAc or GalNAc derivative is attached to an oligonucleotide of the invention via a monovalent linker. In some embodiments, the GalNAc or GalNAc derivative is attached to an oligonucleotide of the invention via a bivalent linker. In yet other embodiments of the invention, the GalNAc or GalNAc derivative is attached to an oligonucleotide of the invention via a trivalent linker. In other embodiments of the invention, the GalNAc or GalNAc derivative is attached to an oligonucleotide of the invention via a tetravalent linker.

[0692] In certain embodiments, the oligonucleotides of the invention comprise one GalNAc or GalNAc derivative attached to the oligonucleotide. In certain embodiments, the oligonucleotides of the invention comprise a plurality (e.g., 2, 3, 4, 5, or 6) GalNAc or GalNAc derivatives, each independently attached to a plurality of nucleotides of the oligonucleotide through a plurality of monovalent linkers.

[0693] In some embodiments, for example, when the two strands of an iRNA agent of the invention are part of one larger molecule connected by an uninterrupted chain of nucleotides between the 3′-end of one strand and the 5′-end of the respective other strand forming a hairpin loop comprising, a plurality of unpaired nucleotides, each unpaired nucleotide within the hairpin loop may independently comprise a GalNAc or GalNAc derivative attached via a monovalent linker. The hairpin loop may also be formed by an extended overhang in one strand of the duplex.

[0694] In some embodiments, for example, when the two strands of an iRNA agent of the invention are part of one larger molecule connected by an uninterrupted chain of nucleotides between the 3′-end of one strand and the 5′-end of the respective other strand forming a hairpin loop comprising, a plurality of unpaired nucleotides, each unpaired nucleotide within the hairpin loop may independently comprise a GalNAc or GalNAc derivative attached via a monovalent linker. The hairpin loop may also be formed by an extended overhang in one strand of the duplex.

[0695] In one embodiment, a carbohydrate conjugate for use in the compositions and methods of the invention is selected from the group consisting of:

[chemical structure]

[chemical structure]

[chemical structure]

[chemical structure]

[chemical structure]

[chemical structure]

[0696] In another embodiment, a carbohydrate conjugate for use in the compositions and methods of the invention is a monosaccharide. In one embodiment, the monosaccharide is an N-acetylgalactosamine, such as

[chemical structure]

[0697] In some embodiments, the oligonucleotide is attached to the carbohydrate conjugate via a linker as shown in the following schematic, wherein X is O or S.

[chemical structure]

[0698] In some embodiments, the oligonucleotide is conjugated to L96 as defined in Table 1 and shown below:

[chemical structure]

[0699] Another representative carbohydrate conjugate for use in the embodiments described herein includes, but is not limited to,

[chemical structure]

when one of X or Y is an oligonucleotide, the other is a hydrogen.

[0700] In some embodiments, a suitable ligand is a ligand disclosed in WO 2019/055633, the entire contents of which are incorporated herein by reference. In one embodiment the ligand comprises the structure below:

[chemical structure]

[0701] In certain embodiments of the invention, the GalNAc or GalNAc derivative is attached to an oligonucleotide of the invention via a monovalent linker. In some embodiments, the GalNAc or GalNAc derivative is attached to an oligonucleotide of the invention via a bivalent linker. In yet other embodiments of the invention, the GalNAc or GalNAc derivative is attached to an oligonucleotide of the invention via a trivalent linker.

[0702] In one embodiment, the oligonucleotides of the invention comprise one or more GalNAc or GalNAc derivative attached to the oligonucleotide. The GalNAc may be attached to any nucleotide via a linker on the sense strand or antsisense strand. The GalNac may be attached to the 5′-end of the sense strand, the 3′ end of the sense strand, the 5′-end of the antisense strand, or the 3′-end of the antisense strand. In one embodiment, the GalNAc is attached to the 3′ end of the sense strand, e.g., via a trivalent linker.

[0703] In other embodiments, the oligonucleotides of the invention comprise a plurality (e.g., 2, 3, 4, 5, or 6) GalNAc or GalNAc derivatives, each independently attached to a plurality of nucleotides of the oligonucleotide through a plurality of linkers, e.g., monovalent linkers.

[0704] In some embodiments, for example, when the two strands of an iRNA agent of the invention is part of one larger molecule connected by an uninterrupted chain of nucleotides between the 3′-end of one strand and the 5′-end of the respective other strand forming a hairpin loop comprising, a plurality of unpaired nucleotides, each unpaired nucleotide within the hairpin loop may independently comprise a GalNAc or GalNAc derivative attached via a monovalent linker.

[0705] In some embodiments, the carbohydrate conjugate further comprises one or more additional ligands as described above, such as, but not limited to, a PK modulator or a cell permeation peptide.

[0706] Additional carbohydrate conjugates and linkers suitable for use in the present invention include those described in PCT Publication Nos. WO 2014/179620 and WO 2014/179627, the entire contents of each of which are incorporated herein by reference.

### D. Linkers

[0707] In some embodiments, the conjugate or ligand described herein can be attached to an oligonucleotide with various linkers that can be cleavable or non-cleavable.

[0708] The term “linker” or “linking group” means an organic moiety that connects two parts of a compound, e.g., covalently attaches two parts of a compound. Linkers typically comprise a direct bond or an atom such as oxygen or sulfur, a unit such as NR8, C(O), C(O)NH, SO, SO₂, SO₂NH or a chain of atoms, such as, but not limited to, substituted or unsubstituted alkyl, substituted or unsubstituted alkenyl, substituted or unsubstituted alkynyl, arylalkyl, arylalkenyl, arylalkynyl, heteroarylalkyl, heteroarylalkenyl, heteroarylalkynyl, heterocyclylalkyl, heterocyclylalkenyl, heterocyclylalkynyl, aryl, heteroaryl, heterocyclyl, cycloalkyl, cycloalkenyl, alkylarylalkyl, alkylarylalkenyl, alkylarylalkynyl, alkenylarylalkyl, alkenylarylalkenyl, alkenylarylalkynyl, alkynylarylalkyl, alkynylarylalkenyl, alkynylarylalkynyl, alkylheteroarylalkyl, alkylheteroarylalkenyl, alkylheteroarylalkynyl, alkenylheteroarylalkyl, alkenylheteroarylalkenyl, alkenylheteroarylalkynyl, alkynylheteroarylalkyl, alkynylheteroarylalkenyl, alkynylheteroarylalkynyl, alkylheterocyclylalkyl, alkylheterocyclylalkenyl, alkylhererocyclylalkynyl, alkenylheterocyclylalkyl, alkenylheterocyclylalkenyl, alkenylheterocyclylalkynyl, alkynylheterocyclylalkyl, alkynylheterocyclylalkenyl, alkynylheterocyclylalkynyl, alkylaryl, alkenylaryl, alkynylaryl, alkylheteroaryl, alkenylheteroaryl, alkynylhereroaryl, which one or more methylenes can be interrupted or terminated by O, S, S(O), SO₂, N(R8), C(O), substituted or unsubstituted aryl, substituted or unsubstituted heteroaryl, or substituted or unsubstituted heterocyclic; where R8 is hydrogen, acyl, aliphatic, or substituted aliphatic. In one embodiment, the linker is about 1-24 atoms, 2-24, 3-24, 4-24, 5-24, 6-24, 6-18, 7-18, 8-18, 7-17, 8-17, 6-16, 7-17, or 8-16 atoms.

[0709] A cleavable linking group is one which is sufficiently stable outside the cell, but which upon entry into a target cell is cleaved to release the two parts the linker is holding together. In an exemplary embodiment, the cleavable linking group is cleaved at least about 10 times, 20, times, 30 times, 40 times, 50 times, 60 times, 70 times, 80 times, 90 times, or more, or at least 100 times faster in a target cell or under a first reference condition (which can, e.g., be selected to mimic or represent intracellular conditions) than in the blood of a subject, or under a second reference condition (which can, e.g., be selected to mimic or represent conditions found in the blood or serum).

[0710] Cleavable linking groups are susceptible to cleavage agents, e.g., pH, redox potential, or the presence of degradative molecules. Generally, cleavage agents are more prevalent or found at higher levels or activities inside cells than in serum or blood. Examples of such degradative agents include: redox agents which are selected for particular substrates or which have no substrate specificity, including, e.g., oxidative or reductive enzymes or reductive agents such as mercaptans, present in cells, that can degrade a redox cleavable linking group by reduction; esterases; endosomes or agents that can create an acidic environment, e.g., those that result in a pH of five or lower; enzymes that can hydrolyze or degrade an acid cleavable linking group by acting as a general acid, peptidases (which can be substrate specific), and phosphatases.

[0711] A cleavable linkage group, such as a disulfide bond can be susceptible to pH. The pH of human serum is 7.4, while the average intracellular pH is slightly lower, ranging from about 7.1-7.3. Endosomes have a more acidic pH, in the range of 5.5-6.0, and lysosomes have an even more acidic pH at around 5.0. Some linkers will have a cleavable linking group that is cleaved at a selected pH, thereby releasing a cationic lipid from the ligand inside the cell, or into the desired compartment of the cell.

[0712] A linker can include a cleavable linking group that is cleavable by a particular enzyme. The type of cleavable linking group incorporated into a linker can depend on the cell to be targeted. For example, a liver-targeting ligand can be linked to a cationic lipid through a linker that includes an ester group. Liver cells are rich in esterases, and therefore the linker will be cleaved more efficiently in liver cells than in cell types that are not esterase-rich. Other cell-types rich in esterases include cells of the lung, renal cortex, and testis.

[0713] Linkers that contain peptide bonds can be used when targeting cell types rich in peptidases, such as liver cells and synoviocytes.

[0714] In general, the suitability of a candidate cleavable linking group can be evaluated by testing the ability of a degradative agent (or condition) to cleave the candidate linking group. It will also be desirable to also test the candidate cleavable linking group for the ability to resist cleavage in the blood or when in contact with other non-target tissue. Thus, one can determine the relative susceptibility to cleavage between a first and a second condition, where the first is selected to be indicative of cleavage in a target cell and the second is selected to be indicative of cleavage in other tissues or biological fluids, e.g., blood or serum. The evaluations can be carried out in cell free systems, in cells, in cell culture, in organ or tissue culture, or in whole animals. It can be useful to make initial evaluations in cell-free or culture conditions and to confirm by further evaluations in whole animals. In certain embodiments, useful candidate compounds are cleaved at least about 2, 4, 10, 20, 30, 40, 50, 60, 70, 80, 90, or 100 times faster in the cell (or under in vitro conditions selected to mimic intracellular conditions) as compared to blood or serum (or under in vitro conditions selected to mimic extracellular conditions).

i. Redox Cleavable Linking Groups

[0715] In certain embodiments, a cleavable linking group is a redox cleavable linking group that is cleaved upon reduction or oxidation. An example of reductively cleavable linking group is a disulphide linking group (—S—S—). To determine if a candidate cleavable linking group is a suitable “reductively cleavable linking group,” or for example is suitable for use with a particular oligonucleotide and particular targeting agent one can look to methods described herein. For example, a candidate can be evaluated by incubation with dithiothreitol (DTT), or other reducing agent using reagents know in the art, which mimic the rate of cleavage which would be observed in a cell, e.g., a target cell. The candidates can also be evaluated under conditions which are selected to mimic blood or serum conditions. In one, candidate compounds are cleaved by at most about 10% in the blood. In other embodiments, useful candidate compounds are degraded at least about 2, 4, 10, 20, 30, 40, 50, 60, 70, 80, 90, or about 100 times faster in the cell (or under in vitro conditions selected to mimic intracellular conditions) as compared to blood (or under in vitro conditions selected to mimic extracellular conditions). The rate of cleavage of candidate compounds can be determined using standard enzyme kinetics assays under conditions chosen to mimic intracellular media and compared to conditions chosen to mimic extracellular media.

ii. Phosphate-Based Cleavable Linking Groups

[0716] In other embodiments, a cleavable linker comprises a phosphate-based cleavable linking group. A phosphate-based cleavable linking group is cleaved by agents that degrade or hydrolyze the phosphate group. An example of an agent that cleaves phosphate groups in cells are enzymes such as phosphatases in cells. Examples of phosphate-based linking groups are —O—P(O)(ORk)-O—, —O—P(S)(ORk)-O—, —O—P(S)(SRk)-O—, —S—P(O)(ORk)-O—, —O—P(O)(ORk)-S—, —S—P(O)(ORk)-S—, —O—P(S)(ORk)-S—, —S—P(S)(ORk)-O—, —O—P(O)(Rk)-O—, —O—P(S)(Rk)-O—, —S—P(O)(Rk)-O—, —S—P(S)(Rk)-O—, —S—P(O)(Rk)-S—, —O—P(S)(Rk)-S—, wherein Rk at each occurrence can be, independently, C1-C20 alkyl, C1-C20 haloalkyl, C6-C10 aryl, or C7-C12 aralkyl. Exemplary embodiments include —O—P(O)(OH)—O—, —O—P(S)(OH)—O—, —O—P(S)(SH)—O—, —S—P(O)(OH)—O—, —O—P(O)(OH)—S—, —S—P(O)(OH)—S—, —O—P(S)(OH)—S—, —S—P(S)(OH)—O—, —O—P(O)(H)—O—, —O—P(S)(H)—O—, —S—P(O)(H)—O, —S—P(S)(H)—O—, —S—P(O)(H)—S—, and —O—P(S)(H)—S—. In certain embodiments a phosphate-based linking group is —O—P(O)(OH)—O—. These candidates can be evaluated using methods analogous to those described above.

iii. Acid Cleavable Linking Groups

[0717] In other embodiments, a cleavable linker comprises an acid cleavable linking group. An acid cleavable linking group is a linking group that is cleaved under acidic conditions. In certain embodiments acid cleavable linking groups are cleaved in an acidic environment with a pH of about 6.5 or lower (e.g., about 6.0, 5.5, 5.0, or lower), or by agents such as enzymes that can act as a general acid. In a cell, specific low pH organelles, such as endosomes and lysosomes can provide a cleaving environment for acid cleavable linking groups. Examples of acid cleavable linking groups include but are not limited to hydrazones, esters, and esters of amino acids. Acid cleavable groups can have the general formula —C═NN—, C(O)O, or —OC(O). An exemplary embodiment is when the carbon attached to the oxygen of the ester (the alkoxy group) is an aryl group, substituted alkyl group, or tertiary alkyl group such as dimethyl pentyl or t-butyl. These candidates can be evaluated using methods analogous to those described above.

iv. Ester-Based Linking Groups

[0718] In other embodiments, a cleavable linker comprises an ester-based cleavable linking group. An ester-based cleavable linking group is cleaved by enzymes such as esterases and amidases in cells. Examples of ester-based cleavable linking groups include, but are not limited to, esters of alkylene, alkenylene and alkynylene groups. Ester cleavable linking groups have the general formula —C(O)O—, or —OC(O)—. These candidates can be evaluated using methods analogous to those described above.

v. Peptide-Based Cleaving Groups

[0719] In yet other embodiments, a cleavable linker comprises a peptide-based cleavable linking group. A peptide-based cleavable linking group is cleaved by enzymes such as peptidases and proteases in cells. Peptide-based cleavable linking groups are peptide bonds formed between amino acids to yield oligopeptides (e.g., dipeptides, tripeptides etc.) and polypeptides. Peptide-based cleavable groups do not include the amide group (—C(O)NH—). The amide group can be formed between any alkylene, alkenylene or alkynelene. A peptide bond is a special type of amide bond formed between amino acids to yield peptides and proteins. The peptide based cleavage group is generally limited to the peptide bond (i.e., the amide bond) formed between amino acids yielding peptides and proteins and does not include the entire amide functional group. Peptide-based cleavable linking groups have the general formula —NHCHRAC(O)NHCHRBC(O)—, where RA and RB are the R groups of the two adjacent amino acids. These candidates can be evaluated using methods analogous to those described above.

[0720] In some embodiments, an iRNA of the invention is conjugated to a carbohydrate through a linker. Non-limiting examples of iRNA carbohydrate conjugates with linkers of the compositions and methods of the invention include, but are not limited to,

[chemical structure]

[chemical structure]

[chemical structure]

when one of X or Y is an oligonucleotide, the other is a hydrogen.

[0721] In certain embodiments of the compositions and methods of the invention, a ligand is one or more “GalNAC” (N-acetylgalactosamine) derivatives attached through a bivalent or trivalent branched linker.

[0722] In one embodiment, an oligonucleotide of the invention is conjugated to a bivalent or trivalent branched linker selected from the group of structures shown in any of formula (XLV)-(XLVI):

[chemical structure]

[0723] wherein:
[0724] q2A, q2B, q3A, q3B, q4A, q4B, q5A, q5B and q5C represent independently for each occurrence 0-20 and wherein the repeating unit can be the same or different;
[0725] P^{2A}, P^{2B}, P^{3A}, P^{3B}, P^{4A}, P^{4B}, P^{5A}, P^{5B}, P^{5C}, T^{2A}, T^{2B}, T^{3A}, T^{3B}, T^{4A}, T^{4B}, T^{4A}, T^{5B}, T^{5C} are each independently for each occurrence absent, CO, NH, O, S, OC(O), NHC(O), CH₂, CH₂NH or CH₂O;
[0726] Q^{2A}, Q^{2B}, Q^{3A}, Q^{3B}, Q^{4A}, Q^{4B}, Q^{5A} Q^{5B}, Q^{5C} are independently for each occurrence absent, alkylene, substituted alkylene wherein one or more methylenes can be interrupted or terminated by one or more of O, S, S(O), SO₂, N(R^{N}), C(R′)═C(R″), C≡C or C(O);
[0727] R^{2A}, R^{2B}, R^{3A}, R^{3A}, R^{4A}, R^{4B}, R^{5A}, R^{5B}, R^{5C} are each independently for each occurrence absent. NH, O, S, CH₂, C(O)O, C(O)NH, NHCH(R^{a})C(O), —C(O)—CH(R^{a})—NH—, CO, CH═N—O,

[chemical structure]

or heterocyclyl;
[0728] L^{2A}, L^{2B}, L^{3A}, L^{3B}, L^{4A}, L^{4B} L^{5A}, L^{5B} and L^{5C} represent the ligand; i.e. each independently for each occurrence a monosaccharide (such as GalNAc), disaccharide, trisaccharide, tetrasaccharide, oligosaccharide, or polysaccharide; and R^{a} is H or amino acid side chain. Trivalent conjugating GalNAc derivatives are particularly useful for use with RNAi agents for inhibiting the expression of a target gene, such as those of formula (XLIX):

[chemical structure]

[0729] wherein L^{5A}, L^{5B} and L^{5C} represent a monosacharide, such as GalNAc derivative.

[0730] Examples of suitable bivalent and trivalent branched linker groups conjugating GalNAc derivatives include, but are not limited to, the structures recited above as formulas II, VII, XI, X, and XIII.

[0731] Representative U.S. patents that teach the preparation of oligonucleotide conjugates include, but are not limited to, U.S. Pat. Nos. 4,828,979; 4,948,882; 5,218,105; 5,525,465; 5,541,313; 5,545,730; 5,552,538; 5,578,717, 5,580,731; 5,591,584; 5,109,124; 5,118,802; 5,138,045; 5,414,077; 5,486,603; 5,512,439; 5,578,718; 5,608,046; 4,587,044; 4,605,735; 4,667,025; 4,762,779; 4,789,737; 4,824,941; 4,835,263; 4,876,335; 4,904,582; 4,958,013; 5,082,830; 5,112,963; 5,214,136; 5,082,830; 5,112,963; 5,214,136; 5,245,022; 5,254,469; 5,258,506; 5,262,536; 5,272,250; 5,292,873; 5,317,098; 5,371,241, 5,391,723; 5,416,203, 5,451,463; 5,510,475; 5,512,667; 5,514,785; 5,565,552; 5,567,810; 5,574,142; 5,585,481; 5,587,371; 5,595,726; 5,597,696; 5,599,923; 5,599,928; 5,688,941; 6,294,664; 6,320,017; 6,576,752; 6,783,931; 6,900,297; 7,037,646; and 8,106,022, the entire contents of each of which are hereby incorporated herein by reference.

[0732] It is not necessary for all positions in a given compound to be uniformly modified, and in fact more than one of the aforementioned modifications can be incorporated in a single compound or even at a single nucleoside within an oligonucleotide. The present invention also includes oligonucleotide compounds that are chimeric compounds.

[0733] For example, “chimeric” iRNA compounds or “chimeras,” in the context of this invention, are iRNA compounds, such as, dsRNAi agents, that contain two or more chemically distinct regions, each made up of at least one monomer unit, i.e., a nucleotide in the case of a dsRNA compound. These iRNAs typically contain at least one region wherein the RNA is modified so as to confer upon the iRNA increased resistance to nuclease degradation, increased cellular uptake, or increased binding affinity for the target nucleic acid. An additional region of the iRNA can serve as a substrate for enzymes capable of cleaving RNA:DNA or RNA:RNA hybrids. By way of example, RNase H is a cellular endonuclease which cleaves the RNA strand of an RNA:DNA duplex. Activation of RNase H, therefore, results in cleavage of the RNA target, thereby greatly enhancing the efficiency of iRNA inhibition of gene expression. Consequently, comparable results can often be obtained with shorter iRNAs when chimeric dsRNAs are used, compared to phosphorothioate deoxy dsRNAs hybridizing to the same target region. Cleavage of the RNA target can be routinely detected by gel electrophoresis and, if necessary, associated nucleic acid hybridization techniques known in the art.

[0734] In certain instances, the oligonucleotide can be modified by a non-ligand group. A number of non-ligand molecules have been conjugated to oligonucleotides in order to enhance the activity, cellular distribution or cellular uptake of the oligonucleotide, and procedures for performing such conjugations are available in the scientific literature. Such non-ligand moieties have included lipid moieties, such as cholesterol (Kubo, T. et al., Biochem. Biophys. Res. Comm., 2007, 365(1):54-61; Letsinger et al., Proc. Natl. Acad. Sci. USA, 1989, 86:6553), cholic acid (Manoharan et al., Bioorg. Med. Chem. Lett., 1994, 4:1053), a thioether, e.g., hexyl-S-tritylthiol (Manoharan et al., Ann. N.Y. Acad. Sci., 1992, 660:306; Manoharan et al., Bioorg. Med. Chem. Let., 1993, 3:2765), a thiocholesterol (Oberhauser et al., Nucl. Acids Res., 1992, 20:533), an aliphatic chain, e.g., dodecandiol or undecyl residues (Saison-Behmoaras et al., EMBO J., 1991, 10:111; Kabanov et al., FEBS Lett., 1990, 259:327; Svinarchuk et al., Biochimie, 1993, 75:49), a phospholipid, e.g., di-hexadecyl-rac-glycerol or triethylammonium 1,2-di-O-hexadecyl-rac-glycero-3-H-phosphonate (Manoharan et al., Tetrahedron Lett., 1995, 36:3651; Shea et al., Nucl. Acids Res., 1990, 18:3777), a polyamine or a polyethylene glycol chain (Manoharan et al., Nucleosides & Nucleotides, 1995, 14:969), or adamantane acetic acid (Manoharan et al., Tetrahedron Lett., 1995, 36:3651), a palmityl moiety (Mishra et al., Biochim. Biophys. Acta, 1995, 1264:229), or an octadecylamine or hexylamino-carbonyl-oxycholesterol moiety (Crooke et al., J. Pharmacol. Exp. Ther., 1996, 277:923). Representative United States patents that teach the preparation of such oligonucleotide conjugates have been listed above. Typical conjugation protocols involve the synthesis of oligonucleotides bearing an aminolinker at one or more positions of the sequence. The amino group is then reacted with the molecule being conjugated using appropriate coupling or activating reagents. The conjugation reaction can be performed either with the oligonucleotide still bound to the solid support or following cleavage of the oligonucleotide, in solution phase. Purification of the RNA conjugate by HPLC typically affords the pure conjugate.

### B. Antibodies, or Antigen-Binding Fragments Thereof, of the Invention

[0735] In some embodiments, the modulator of the invention is an antibody, or antigen-binding fragment thereof, that specifically binds INHBE, e.g., a monoclonal anti-INHBE antibody, or antigen-binding fragment thereof.

[0736] The antibody modulators can be identified, screened for (e.g., using phage display), or characterized for their physical/chemical properties and/or biological activities by various assays known in the art (see, for example, Antibodies: A Laboratory Manual, Second edition, Greenfield, ed., 2014). Binding specificity of an antibody for its antigen can be tested by known methods in the art such as ELISA, Western blot, or surface plasmon resonance.

[0737] In some embodiments, the anti-INHBE antibody or antigen-binding fragment thereof is a humanized antibody or antigen-binding fragment thereof. Humanized antibodies may be useful as therapeutic molecules because humanized antibodies may reduce or eliminate the human immune response to non-human antibodies (such as the human anti-mouse antibody response), which can result in an immune response to an antibody therapeutic, and decreased effectiveness of the therapeutic.

[0738] In some embodiments, the anti-INHBE antibody or antigen-binding fragment thereof is a chimeric antibody or antigen-binding fragment thereof. In some embodiments, an anti-INHBE antibody or antigen-binding fragment thereof comprises at least one non-human variable region and at least one human constant region. In some such embodiments, all of the variable regions of an anti-INHBE antibody are non-human variable regions, and all of the constant regions of an anti-INHBE antibody are human constant regions. In some embodiments, one or more variable regions of a chimeric antibody are mouse variable regions. The human constant region of a chimeric antibody need not be of the same isotype as the non-human constant region, if any, it replaces. Chimeric antibodies are discussed, e.g., in U.S. Pat. No. 4,816,567; and Morrison et al. Proc. Natl. Acad. Sci. USA 81: 6851-55 (1984).

[0739] In some embodiments, the anti-INHBE antibody or antigen-binding fragment thereof is a human antibody or antigen-binding fragment thereof.

[0740] In some embodiments, the antibody modulator, e.g., the anti-INHBE antibody or antigen-binding fragment thereof, is a monoclonal anti-INHBE antibody or antigen-binding fragment thereof.

[0741] In some embodiments, the antibody modulator, e.g., the anti-INHBE antibody or antigen-binding fragment thereof, is multi-specific (e.g., bi-specific). A multi-specific antigen-binding fragment of an antibody will typically comprise at least two different variable domains, wherein each variable domain is capable of specifically binding to a separate antigen or to a different epitope on the same antigen. Any multi-specific antibody format, including the exemplary bi-specific antibody formats disclosed herein, may be adapted for use in the context of an antigen-binding fragment of an antibody of the present invention using routine techniques available in the art.

[0742] The antibody modulators of the present invention can be produced using any methods known in the art. For example, the antibodies, and antigen-binding fragments thereof, can be produced using recombinant DNA methods. Expression vector(s) encoding the heavy and light chains is (are) transfected into a host cell by standard techniques. The various forms of the term “transfection” are intended to encompass a wide variety of techniques commonly used for the introduction of exogenous DNA into a prokaryotic or eukaryotic host cell, e.g., electroporation, calcium-phosphate precipitation, DEAE-dextran transfection and the like.

[0743] Host cells may be a prokaryotic or eukaryotic cell. The polynucleotide or vector which is present in the host cell may either be integrated into the genome of the host cell or it may be maintained extrachromosomally. The host cell can be any prokaryotic or eukaryotic cell, such as a bacterial, insect, fungal, plant, animal or human cell. In some embodiments, fungal cells are, for example, those of the genus Saccharomyces, in particular those of the species S. cerevisiae. The term “prokaryotic” includes all bacteria which can be transformed or transfected with a DNA or RNA molecules for the expression of an antibody or the corresponding immunoglobulin chains. Prokaryotic hosts may include gram negative as well as gram positive bacteria such as, for example, E. coli, S. typhimurium, Serratia marcescens and Bacillus subtilis. The term “eukaryotic” includes yeast, higher plants, insects and vertebrate cells, e.g., mammalian cells, such as NSO and CHO cells. Depending upon the host employed in a recombinant production procedure, the antibodies or immunoglobulin chains encoded by the polynucleotide may be glycosylated or may be non-glycosylated. Antibodies or the corresponding immunoglobulin chains may also include an initial methionine amino acid residue. Although it is possible to express antibodies in either prokaryotic or eukaryotic host cells, expression of antibodies in eukaryotic cells is preferable, and most preferable in mammalian host cells, because such eukaryotic cells (and in particular mammalian cells) are more likely than prokaryotic cells to assemble and secrete a properly folded and immunologically active antibody.

[0744] In some embodiments, once a vector has been incorporated into an appropriate host, the host may be maintained under conditions suitable for high level expression of the nucleotide sequences, and, as desired, the collection and purification of the immunoglobulin light chains, heavy chains, light/heavy chain dimers or intact antibodies, antigen binding fragments thereof or other immunoglobulin forms may follow; see, Beychok, Cells of Immunoglobulin Synthesis, Academic Press, N.Y., (1979). Thus, polynucleotides or vectors are introduced into the cells which in turn produce the antibody or antigen binding fragments thereof. Furthermore, transgenic animals, preferably mammals, comprising the aforementioned host cells may be used for the large scale production of the antibody or antibody fragments thereof.

[0745] The transformed host cells can be grown in fermenters and cultured using any suitable techniques to achieve optimal cell growth. Once expressed, the whole antibodies, their dimers, individual light and heavy chains, other immunoglobulin forms, or antigen binding fragments thereof, can be purified according to standard procedures of the art, including ammonium sulfate precipitation, affinity columns, column chromatography, gel electrophoresis and the like; see, Scopes, “Protein Purification”, Springer Verlag, N.Y. (1982). The antibody or antigen binding fragments thereof can then be isolated from the growth medium, cellular lysates, or cellular membrane fractions. The isolation and purification of the, e.g., microbially expressed antibodies or antigen binding fragments thereof may be by any conventional means such as, for example, preparative chromatographic separations and immunological separations such as those involving the use of monoclonal or polyclonal antibodies directed, e.g., against the constant region of the antibody.

[0746] Aspects of the present invention relate to a hybridoma, which provides an indefinitely prolonged source of monoclonal antibodies. As an alternative to obtaining immunoglobulins directly from the culture of hybridomas, immortalized hybridoma cells can be used as a source of rearranged heavy chain and light chain loci for subsequent expression and/or genetic manipulation. Rearranged antibody genes can be reverse transcribed from appropriate mRNAs to produce cDNA. In some embodiments, heavy chain constant region can be exchanged for that of a different isotype or eliminated altogether. The variable regions can be linked to encode single chain Fv regions. Multiple Fv regions can be linked to confer binding ability to more than one target or chimeric heavy and light chain combinations can be employed. Any appropriate method may be used for cloning of antibody variable regions and generation of recombinant antibodies, and antigen-binding portions thereof.

[0747] In some embodiments, an appropriate nucleic acid that encodes variable regions of a heavy and/or light chain is obtained and inserted into an expression vectors which can be transfected into standard recombinant host cells. A variety of such host cells may be used. In some embodiments, mammalian host cells may be advantageous for efficient processing and production. Typical mammalian cell lines useful for this purpose include CHO cells, 293 cells, or NSO cells. The production of the antibody or antigen binding fragment thereof may be undertaken by culturing a modified recombinant host under culture conditions appropriate for the growth of the host cells and the expression of the coding sequences. The antibodies or antigen binding fragments thereof may be recovered by isolating them from the culture. The expression systems may be designed to include signal peptides so that the resulting antibodies are secreted into the medium; however, intracellular production is also possible.

[0748] The present invention also includes a polynucleotide encoding at least a variable region of an immunoglobulin chain of the antibodies described herein. In some embodiments, the variable region encoded by the polynucleotide comprises at least one complementarity determining region (CDR) of the VH and/or VL of the variable region of the antibody produced by any one of the above described hybridomas.

[0749] Polynucleotides encoding antibody or antigen binding fragments thereof may be, e.g., DNA, cDNA, RNA or synthetically produced DNA or RNA or a recombinantly produced chimeric nucleic acid molecule comprising any of those polynucleotides either alone or in combination. In some embodiments, a polynucleotide is part of a vector. Such vectors may comprise further genes such as marker genes which allow for the selection of the vector in a suitable host cell and under suitable conditions.

[0750] In some embodiments, a polynucleotide is operatively linked to expression control sequences allowing expression in prokaryotic or eukaryotic cells. Expression of the polynucleotide comprises transcription of the polynucleotide into a translatable mRNA. Regulatory elements ensuring expression in eukaryotic cells, preferably mammalian cells, are well known to those skilled in the art. They may include regulatory sequences that facilitate initiation of transcription and optionally poly-A signals that facilitate termination of transcription and stabilization of the transcript. Additional regulatory elements may include transcriptional as well as translational enhancers, and/or naturally associated or heterologous promoter regions. Possible regulatory elements permitting expression in prokaryotic host cells include, e.g., the PL, Lac, Trp or Tac promoter in E. coli, and examples of regulatory elements permitting expression in eukaryotic host cells are the AOX1 or GAL1 promoter in yeast or the CMV-promoter, SV40-promoter, RSV-promoter (Rous sarcoma virus), CMV-enhancer, SV40-enhancer or a globin intron in mammalian and other animal cells.

[0751] Beside elements which are responsible for the initiation of transcription such regulatory elements may also include transcription termination signals, such as the SV40-poly-A site or the tk-poly-A site, downstream of the polynucleotide. Furthermore, depending on the expression system employed, leader sequences capable of directing the polypeptide to a cellular compartment or secreting it into the medium may be added to the coding sequence of the polynucleotide and have been described previously. The leader sequence(s) is (are) assembled in appropriate phase with translation, initiation and termination sequences, and preferably, a leader sequence capable of directing secretion of translated protein, or a portion thereof, into, for example, the extracellular medium. Optionally, a heterologous polynucleotide sequence can be used that encode a fusion protein including a C- or N-terminal identification peptide imparting desired characteristics, e.g., stabilization or simplified purification of expressed recombinant product.

[0752] In some embodiments, polynucleotides encoding at least the variable domain of the light and/or heavy chain may encode the variable domains of both immunoglobulin chains or only one. Likewise, a polynucleotide(s) may be under the control of the same promoter or may be separately controlled for expression. Furthermore, some aspects relate to vectors, particularly plasmids, cosmids, viruses and bacteriophages used conventionally in genetic engineering that comprise a polynucleotide encoding a variable domain of an immunoglobulin chain of an antibody or antigen binding fragment thereof; optionally in combination with a polynucleotide that encodes the variable domain of the other immunoglobulin chain of the antibody.

[0753] In some embodiments, expression control sequences are provided as eukaryotic promoter systems in vectors capable of transforming or transfecting eukaryotic host cells, but control sequences for prokaryotic hosts may also be used. Expression vectors derived from viruses such as retroviruses, vaccinia virus, adeno-associated virus, herpes viruses, or bovine papilloma virus, may be used for delivery of the polynucleotides or vector into targeted cell population (e.g., to engineer a cell to express an antibody or antigen binding fragment thereof). A variety of appropriate methods can be used to construct recombinant viral vectors. In some embodiments, polynucleotides and vectors can be reconstituted into liposomes for delivery to target cells. The vectors containing the polynucleotides (e.g., the heavy and/or light variable domain(s) of the immunoglobulin chains encoding sequences and expression control sequences) can be transferred into the host cell by suitable methods, which vary depending on the type of cellular host.

[0754] Monoclonal antibodies, and antigen-binding fragments thereof, may also be produced by generation of hybridomas (see e.g., Kohler and Milstein (1975) Nature, 256: 495-499) in accordance with known methods. Hybridomas formed in this manner are then screened using standard methods, such as enzyme-linked immunosorbent assay (ELISA) and surface plasmon resonance (e.g., OCTET or BIACORE) analysis, to identify one or more hybridomas that produce an antibody, or an antigen-binding portion thereof, that specifically binds to a specified antigen, e.g., INHBE, e.g., wild type INHBE, or mutant INHBE. Any form of the specified antigen may be used as the immunogen, e.g., recombinant antigen, naturally occurring forms, any variants or fragments thereof, as well as antigenic peptide thereof (e.g., any of the epitopes described herein as a linear epitope or within a scaffold as a conformational epitope). One exemplary method of making antibodies, and antigen-binding portions thereof, includes screening protein expression libraries that express antibodies or fragments thereof (e.g., scFv), e.g., phage or ribosome display libraries. Phage display is described, for example, in Ladner et al., U.S. Pat. No. 5,223,409; Smith (1985) Science 228:1315-1317; Clackson et al. (1991) Nature, 352: 624-628; Marks et al. (1991) J. Mol. Biol., 222: 581-597WO92/18619; WO 91/17271; WO 92/20791; WO 92/15679; WO 93/01288; WO 92/01047; WO 92/09690; and WO 90/02809.

[0755] In addition to the use of display libraries, the specified antigen (e.g., INHBE) can be used to immunize a non-human animal, e.g., a rodent, e.g., a mouse, hamster, or rat. In one embodiment, the non-human animal is a mouse.

[0756] In another embodiment, a monoclonal antibody is obtained from the non-human animal, and then modified, e.g., chimeric, using suitable recombinant DNA techniques. A variety of approaches for making chimeric antibodies have been described. See e.g., Morrison et al., Proc. Natl. Acad. Sci. U.S.A. 81:6851, 1985; Takeda et al., Nature 314:452, 1985, Cabilly et al., U.S. Pat. No. 4,816,567; Boss et al., U.S. Pat. No. 4,816,397.

[0757] For additional antibody production techniques, see Antibodies: A Laboratory Manual, eds. Harlow et al., Cold Spring Harbor Laboratory, 1988. The present invention is not necessarily limited to any particular source, method of production, or other special characteristics of an antibody.

[0758] Methods for generating human antibodies in transgenic mice are also known in the art. Any such known methods can be used in the context of the present invention to make human antibodies that specifically bind to human INHBE.

[0759] In some embodiment, high affinity chimeric antibodies are isolated having a human variable region and a mouse constant region. The antibodies are characterized and selected for desirable characteristics, including affinity, selectivity, epitope, etc. The mouse constant regions are replaced with a desired human constant region to generate the fully human antibody of the invention, for example wild-type or modified lgG1 or lgG4. While the constant region selected may vary according to specific use, high affinity antigen-binding and target specificity characteristics reside in the variable region.

### C. GuideRNAs Effecting ADAR Editing of the Invention

[0760] The present invention also provides guideRNAs that effect ADAR editing of the INHBE gene. Any of the nucleotides disclosed herein (such as the nucleotides in Tables 2-5) can be used to design guideRNAs that effect ADAR editing. Methods for designing and preparing such guideRNAs are described in, for example, WO2016097212A1, WO2017220751A1, US20210261955A1 and WO2018041973A1, the entire contents of which are incorporated herein by reference.

### D. GuideRNAs Effecting CRISPR Editing of the Invention

[0761] The present invention also provides guideRNAs that effect CRISPR editing of the INHBE gene. Any of the nucleotides disclosed herein (such as the nucleotides in Tables 2-5) can be used to design guideRNAs that effect CRISPR editing. Methods for designing and preparing such guideRNAs are described in, for example, US20200248180 and US20190316121, the entire contents of which are incorporated herein by reference.

### IV. Delivery of a Modulator of the Invention

[0762] The delivery of a modulator of the invention to a cell e.g., a cell within a subject, such as a human subject (e.g., a subject in need thereof, such as a subject susceptible to or diagnosed with an INHBE-associated disorder, e.g., metablic disorder, e.g., metabolic syndrome, a disorder of carbohydrates, e.g., type II diabetes, pre-diabetes, a lipid metabolism disorder, e.g., a hyperlipidemia, hypertension, a cardiovascular disease, a disorders of body weight) can be achieved in a number of different ways. For example, delivery may be performed by contacting a cell with a modulator of the invention either in vitro or in vivo. In vivo delivery may also be performed directly by administering a composition comprising a modulator to a subject. Alternatively, in vivo delivery may be performed indirectly by administering one or more vectors that encode and direct the expression of the modulator. These alternatives are discussed further below.

[0763] With respect to the oligonucleotide modulators of the invention, e.g., dsRNA agent or antisense polynucleotide agents, in general, any method of delivering a nucleic acid molecule (in vitro or in vivo) can be adapted for use with an iRNA of the invention (see e.g., Akhtar S. and Julian R L. (1992) Trends Cell. Biol. 2(5):139-144 and WO94/02595, which are incorporated herein by reference in their entireties). For in vivo delivery, factors to consider in order to deliver an iRNA molecule include, for example, biological stability of the delivered molecule, prevention of non-specific effects, and accumulation of the delivered molecule in the target tissue. RNA interference has also shown success with local delivery to the CNS by direct injection (Dorn, G., et al. (2004) Nucleic Acids 32:e49; Tan, P H., et al (2005) Gene Ther. 12:59-66; Makimura, H., et al (2002) BMC Neurosci. 3:18; Shishkina, G T., et al (2004) Neuroscience 129:521-528; Thakker, E R., et al (2004) Proc. Natl. Acad. Sci. U.S.A. 101:17270-17275; Akaneya,Y., et al (2005) J. Neurophysiol. 93:594-602). Modification of the RNA or the pharmaceutical carrier can also permit targeting of the iRNA to the target tissue and avoid undesirable off-target effects. iRNA molecules can be modified by chemical conjugation to lipophilic groups such as cholesterol to enhance cellular uptake and prevent degradation. For example, an iRNA directed against ApoB conjugated to a lipophilic cholesterol moiety was injected systemically into mice and resulted in knockdown of apoB mRNA in both the liver and jejunum (Soutschek, J., et al (2004) Nature 432:173-178).

[0764] In an alternative embodiment, the modulator can be delivered using drug delivery systems such as a nanoparticle, a dendrimer, a polymer, liposomes, or a cationic delivery system. For example, positively charged cationic delivery systems facilitate binding of an iRNA molecule (negatively charged) and also enhance interactions at the negatively charged cell membrane to permit efficient uptake of an iRNA by the cell. Cationic lipids, dendrimers, or polymers can either be bound to an iRNA, or induced to form a vesicle or micelle (see e.g., Kim S H, et al (2008) Journal of Controlled Release 129(2):107-116) that encases an iRNA. The formation of vesicles or micelles further prevents degradation of the iRNA when administered systemically. Methods for making and administering cationic-iRNA complexes are well within the abilities of one skilled in the art (see e.g., Sorensen, D R, et al (2003) J. Mol. Biol 327:761-766; Verma, U N, et al (2003) Clin. Cancer Res. 9:1291-1300; Arnold, A S et al (2007) J. Hypertens. 25:197-205, which are incorporated herein by reference in their entirety). Some non-limiting examples of drug delivery systems useful for systemic delivery of iRNAs include DOTAP (Sorensen, D R., et al (2003), supra; Verma, U N, et al (2003), supra), “solid nucleic acid lipid particles” (Zimmermann, T S, et al (2006) Nature 441:111-114), cardiolipin (Chien, P Y, et al (2005) Cancer Gene Ther. 12:321-328; Pal, A, et al (2005) Int J. Oncol. 26:1087-1091), polyethyleneimine (Bonnet M E, et al (2008) Pharm. Res. August 16 Epub ahead of print; Aigner, A. (2006) J. Biomed. Biotechnol. 71659), Arg-Gly-Asp (RGD) peptides (Liu, S. (2006) Mol. Pharm. 3:472-487), and polyamidoamines (Tomalia, D A, et al (2007) Biochem. Soc. Trans. 35:61-67; Yoo, H., et al (1999) Pharm. Res. 16:1799-1804). In some embodiments, an iRNA forms a complex with cyclodextrin for systemic administration. Methods for administration and pharmaceutical compositions of iRNAs and cyclodextrins can be found in U.S. Pat. No. 7,427,605, which is herein incorporated by reference in its entirety. Certain aspects of the instant disclosure relate to a method of reducing the expression and/or acticity of INHBE in a cell, comprising contacting said cell with the modulator of the disclosure. In one embodiment, the cell is a hepatic cell, optionally a hepatocyte. In one embodiment, the cell is an extrahepatic cell.

### A. Vector Encoded Oligonucleotides of the Invention

[0765] Oligonucleotides targeting the INHBE gene can be expressed from transcription units inserted into DNA or RNA vectors (see, e.g., Couture, A, et al., TIG. (1996), 12:5-10; Skillern, A, et al., International PCT Publication No. WO 00/22113, Conrad, International PCT Publication No. WO 00/22114, and Conrad, U.S. Pat. No. 6,054,299). Expression can be transient (on the order of hours to weeks) or sustained (weeks to months or longer), depending upon the specific construct used and the target tissue or cell type. These transgenes can be introduced as a linear construct, a circular plasmid, or a viral vector, which can be an integrating or non-integrating vector. The transgene can also be constructed to permit it to be inherited as an extrachromosomal plasmid (Gassmann, et al., Proc. Natl. Acad. Sci. USA (1995) 92:1292).

[0766] Viral vector systems which can be utilized with the methods and compositions described herein include, but are not limited to, (a) adenovirus vectors; (b) retrovirus vectors, including but not limited to lentiviral vectors, moloney murine leukemia virus, etc.; (c) adeno-associated virus vectors; (d) herpes simplex virus vectors; (e) SV 40 vectors; (f) polyoma virus vectors; (g) papilloma virus vectors; (h) picornavirus vectors; (i) pox virus vectors such as an orthopox, e.g., vaccinia virus vectors or avipox, e.g. canary pox or fowl pox; and (j) a helper-dependent or gutless adenovirus. Replication-defective viruses can also be advantageous. Different vectors will or will not become incorporated into the cells' genome. The constructs can include viral sequences for transfection, if desired. Alternatively, the construct can be incorporated into vectors capable of episomal replication, e.g. EPV and EBV vectors. Constructs for the recombinant expression of an iRNA will generally require regulatory elements, e.g., promoters, enhancers, etc., to ensure the expression of the iRNA in target cells. Other aspects to consider for vectors and constructs are known in the art.

### V. Pharmaceutical Compositions of the Invention

[0767] The present invention also includes pharmaceutical compositions and formulations which include the modulators of the invention. In one embodiment, provided herein are pharmaceutical compositions containing a modulator, as described herein, and a pharmaceutically acceptable carrier. The pharmaceutical compositions containing the modulator are useful for preventing or treating an INHBE-associated disorder, e.g., metablic disorder, e.g., metabolic syndrome, a disorder of carbohydrates, e.g., type II diabetes, pre-diabetes, a lipid metabolism disorder, e.g., a hyperlipidemia, hypertension, a cardiovascular disease, a disorders of body weight.

[0768] Such pharmaceutical compositions are formulated based on the mode of delivery. One example is compositions that are formulated for systemic administration via parenteral delivery, e.g., by subcutaneous (SC), intramuscular (IM), or intravenous (IV) delivery. The pharmaceutical compositions of the invention may be administered in dosages sufficient to inhibit expression of an INHBE gene.

[0769] In some embodiments, the pharmaceutical compositions of the invention are sterile. In another embodiment, the pharmaceutical compositions of the invention are pyrogen free.

[0770] The pharmaceutical compositions of the invention may be administered in dosages sufficient to inhibit expression and/or actovoty of INHBE. In general, a suitable dose of a modulator of the invention will be in the range of about 0.001 to about 200.0 milligrams per kilogram body weight of the recipient per day, generally in the range of about 1 to 50 mg per kilogram body weight per day. Typically, a suitable dose of a modulator of the invention will be in the range of about 0.1 mg/kg to about 5.0 mg/kg, such as, about 0.3 mg/kg and about 3.0 mg/kg. A repeat-dose regimen may include administration of a therapeutic amount of a modulator on a regular basis, such as every month, once every 3-6 months, or once a year. In certain embodiments, the modulator is administered about once per month to about once per six months.

[0771] After an initial treatment regimen, the treatments can be administered on a less frequent basis. Duration of treatment can be determined based on the severity of disease.

[0772] In other embodiments, a single dose of the pharmaceutical compositions can be long lasting, such that doses are administered at not more than 1, 2, 3, or 4 month intervals. In some embodiments of the invention, a single dose of the pharmaceutical compositions of the invention is administered about once per month. In other embodiments of the invention, a single dose of the pharmaceutical compositions of the invention is administered quarterly (i.e., about every three months). In other embodiments of the invention, a single dose of the pharmaceutical compositions of the invention is administered twice per year (i.e., about once every six months).

[0773] The skilled artisan will appreciate that certain factors can influence the dosage and timing required to effectively treat a subject, including but not limited to mutations present in the subject, previous treatments, the general health or age of the subject, and other diseases present. Moreover, treatment of a subject with a prophylactically or therapeutically effective amount, as appropriate, of a composition can include a single treatment or a series of treatments.

[0774] The pharmaceutical compositions of the present disclosure can be administered in a number of ways depending upon whether local or systemic treatment is desired and upon the area to be treated. Administration may be topical (including ophthalmic, vaginal, rectal, intranasal, transdermal), oral, or parenteral. Parenteral administration includes intravenous, intraarterial, subcutaneous, intraperitoneal or intramuscular injection or infusion; subdermal, e.g., via an implanted device; or intracranial, e.g., by intraparenchymal, intrathecal or intraventricular, administration.

[0775] The modulator can be delivered in a manner to target a particular tissue, such as the liver.

[0776] Pharmaceutical compositions and formulations for topical administration can include transdermal patches, ointments, lotions, creams, gels, drops, suppositories, sprays, liquids and powders. Conventional pharmaceutical carriers, aqueous, powder or oily bases, thickeners and the like can be necessary or desirable. Coated condoms, gloves and the like can also be useful. Suitable topical formulations include those in which the modulators featured in the disclosure are in admixture with a topical delivery agent such as lipids, liposomes, fatty acids, fatty acid esters, steroids, chelating agents and surfactants. Suitable lipids and liposomes include neutral (e.g., dioleoylphosphatidyl DOPE ethanolamine, dimyristoylphosphatidyl choline DMPC, distearolyphosphatidyl choline) negative (e.g., dimyristoylphosphatidyl glycerol DMPG) and cationic (e.g., dioleoyltetramethylaminopropyl DOTAP and dioleoylphosphatidyl ethanolamine DOTMA). Modulators featured in the disclosure can be encapsulated within liposomes or can form complexes thereto, in particular to cationic liposomes. Alternatively, modulators can be complexed to lipids, in particular to cationic lipids. Suitable fatty acids and esters include but are not limited to arachidonic acid, oleic acid, eicosanoic acid, lauric acid, caprylic acid, capric acid, myristic acid, palmitic acid, stearic acid, linoleic acid, linolenic acid, dicaprate, tricaprate, monoolein, dilaurin, glyceryl 1-monocaprate, 1-dodecylazacycloheptan-2-one, an acylcarnitine, an acylcholine, or a C1-20 alkyl ester (e.g., isopropylmyristate IPM), monoglyceride, diglyceride or pharmaceutically acceptable salt thereof. Topical formulations are described in detail in U.S. Pat. No. 6,747,014, which is incorporated herein by reference.

[0777] In one embodiment, the modulators of the invention, are administered to a cell in a pharmaceutical composition by a topical route of administration. In one embodiment, the pharmaceutical composition may include a modulator mixed with a topical delivery agent. The topical delivery agent can be a plurality of microscopic vesicles. The microscopic vesicles can be liposomes. In some embodiments the liposomes are cationic liposomes.

[0778] In another embodiment, the modulator is admixed with a topical penetration enhancer. In one embodiment, the topical penetration enhancer is a fatty acid. The fatty acid can be arachidonic acid, oleic acid, lauric acid, caprylic acid, capric acid, myristic acid, palmitic acid, stearic acid, linoleic acid, linolenic acid, dicaprate, tricaprate, monolein, dilaurin, glyceryl 1-monocaprate, 1-dodecylazacycloheptan-2-one, an acylcarnitine, an acylcholine, or a C1-10 alkyl ester, monoglyceride, diglyceride or pharmaceutically acceptable salt thereof.

[0779] In another embodiment, the topical penetration enhancer is a bile salt. The bile salt can be cholic acid, dehydrocholic acid, deoxycholic acid, glucholic acid, glycholic acid, glycodeoxycholic acid, taurocholic acid, taurodeoxycholic acid, chenodeoxycholic acid, ursodeoxycholic acid, sodium tauro-24,25-dihydro-fusidate, sodium glycodihydrofusidate, polyoxyethylene-9-lauryl ether or a pharmaceutically acceptable salt thereof.

[0780] In another embodiment, the penetration enhancer is a chelating agent. The chelating agent can be EDTA, citric acid, a salicyclate, a N-acyl derivative of collagen, laureth-9, an N-amino acyl derivative of a beta-diketone or a mixture thereof.

[0781] In another embodiment, the penetration enhancer is a surfactant, e.g., an ionic or nonionic surfactant. The surfactant can be sodium lauryl sulfate, polyoxyethylene-9-lauryl ether, polyoxyethylene-20-cetyl ether, a perfluorchemical emulsion or mixture thereof.

[0782] In another embodiment, the penetration enhancer can be selected from a group consisting of unsaturated cyclic ureas, 1-alkyl-alkones, 1-alkenylazacyclo-alakanones, steroidal anti-inflammatory agents and mixtures thereof. In yet another embodiment the penetration enhancer can be a glycol, a pyrrol, an azone, or a terpenes.

[0783] In one aspect, the invention features a pharmaceutical composition including a modulator in an injectable dosage form. In one embodiment, the injectable dosage form of the pharmaceutical composition includes sterile aqueous solutions or dispersions and sterile powders. In some embodiments the sterile solution can include a diluent such as water; saline solution; fixed oils, polyethylene glycols, glycerin, or propylene glycol.

[0784] The modulators of the invention can be incorporated into pharmaceutical compositions. Such compositions typically include one or more species of modulator and a pharmaceutically acceptable carrier. As used herein the language “pharmaceutically acceptable carrier” is intended to include any and all solvents, dispersion media, coatings, antibacterial and antifungal agents, isotonic and absorption delaying agents, and the like, compatible with pharmaceutical administration to a cell, e.g., a liver cell. The use of such media and agents for pharmaceutically active substances is well known in the art. Except insofar as any conventional media or agent is incompatible with the active compound, use thereof in the compositions is contemplated. Supplementary active compounds can also be incorporated into the compositions.

[0785] Pharmaceutical compositions of the present invention include, but are not limited to, solutions, emulsions, and liposome-containing formulations. These compositions can be generated from a variety of components that include, but are not limited to, preformed liquids, self-emulsifying solids, and self-emulsifying semisolids. Formulations include those that target the liver.

[0786] The pharmaceutical formulations of the present invention, which can conveniently be presented in unit dosage form, can be prepared according to conventional techniques well known in the pharmaceutical industry. Such techniques include the step of bringing into association the active ingredients with the pharmaceutical carrier(s) or excipient(s). In general, the formulations are prepared by uniformly and intimately bringing into association the active ingredients with liquid carriers.

### A. Additional Formulations

i. Emulsions

[0787] The compositions of the present invention can be prepared and formulated as emulsions.

[0788] Emulsions are typically heterogeneous systems of one liquid dispersed in another in the form of droplets usually exceeding 0.1 μm in diameter (see e.g., Ansel's Pharmaceutical Dosage Forms and Drug Delivery Systems, Allen, LV., Popovich N G., and Ansel H C., 2004, Lippincott Williams & Wilkins (8th ed.), New York, NY; Idson, in Pharmaceutical Dosage Forms, Lieberman, Rieger and Banker (Eds.), 1988, Marcel Dekker, Inc., New York, N.Y., volume 1, p. 199; Rosoff, in Pharmaceutical Dosage Forms, Lieberman, Rieger and Banker (Eds.), 1988, Marcel Dekker, Inc., New York, N.Y., Volume 1, p. 245; Block in Pharmaceutical Dosage Forms, Lieberman, Rieger and Banker (Eds.), 1988, Marcel Dekker, Inc., New York, N.Y., volume 2, p. 335; Higuchi et al., in Remington's Pharmaceutical Sciences, Mack Publishing Co., Easton, Pa., 1985, p. 301). Emulsions are often biphasic systems comprising two immiscible liquid phases intimately mixed and dispersed with each other. In general, emulsions can be of either the water-in-oil (w/o) or the oil-in-water (o/w) variety. When an aqueous phase is finely divided into and dispersed as minute droplets into a bulk oily phase, the resulting composition is called a water-in-oil (w/o) emulsion. Alternatively, when an oily phase is finely divided into and dispersed as minute droplets into a bulk aqueous phase, the resulting composition is called an oil-in-water (o/w) emulsion. Emulsions can contain additional components in addition to the dispersed phases, and the active drug which can be present as a solution either in the aqueous phase, oily phase or itself as a separate phase. Pharmaceutical excipients such as emulsifiers, stabilizers, dyes, and anti-oxidants can also be present in emulsions as needed. Pharmaceutical emulsions can also be multiple emulsions that are comprised of more than two phases such as, for example, in the case of oil-in-water-in-oil (o/w/o) and water-in-oil-in-water (w/o/w) emulsions. Such complex formulations often provide certain advantages that simple binary emulsions do not. Multiple emulsions in which individual oil droplets of an o/w emulsion enclose small water droplets constitute a w/o/w emulsion. Likewise a system of oil droplets enclosed in globules of water stabilized in an oily continuous phase provides an o/w/o emulsion.

[0789] Emulsions are characterized by little or no thermodynamic stability. Often, the dispersed or discontinuous phase of the emulsion is well dispersed into the external or continuous phase and maintained in this form through the means of emulsifiers or the viscosity of the formulation. Other means of stabilizing emulsions entail the use of emulsifiers that can be incorporated into either phase of the emulsion. Emulsifiers can broadly be classified into four categories: synthetic surfactants, naturally occurring emulsifiers, absorption bases, and finely dispersed solids (see e.g., Ansel's Pharmaceutical Dosage Forms and Drug Delivery Systems, Allen, LV., Popovich N G., and Ansel H C., 2004, Lippincott Williams & Wilkins (8th ed.), New York, NY; Idson, in Pharmaceutical Dosage Forms, Lieberman, Rieger and Banker (Eds.), 1988, Marcel Dekker, Inc., New York, N.Y., volume 1, p. 199).

[0790] Synthetic surfactants, also known as surface active agents, have found wide applicability in the formulation of emulsions and have been reviewed in the literature (see e.g., Ansel's Pharmaceutical Dosage Forms and Drug Delivery Systems, Allen, LV., Popovich N G., and Ansel H C., 2004, Lippincott Williams & Wilkins (8th ed.), New York, NY; Rieger, in Pharmaceutical Dosage Forms, Lieberman, Rieger and Banker (Eds.), 1988, Marcel Dekker, Inc., New York, N.Y., volume 1, p. 285; Idson, in Pharmaceutical Dosage Forms, Lieberman, Rieger and Banker (Eds.), Marcel Dekker, Inc., New York, N.Y., 1988, volume 1, p. 199). Surfactants are typically amphiphilic and comprise a hydrophilic and a hydrophobic portion. The ratio of the hydrophilic to the hydrophobic nature of the surfactant has been termed the hydrophile/lipophile balance (HLB) and is a valuable tool in categorizing and selecting surfactants in the preparation of formulations. Surfactants can be classified into different classes based on the nature of the hydrophilic group: nonionic, anionic, cationic, and amphoteric (see e.g., Ansel's Pharmaceutical Dosage Forms and Drug Delivery Systems, Allen, LV., Popovich N G., and Ansel H C., 2004, Lippincott Williams & Wilkins (8th ed.), New York, NY Rieger, in Pharmaceutical Dosage Forms, Lieberman, Rieger and Banker (Eds.), 1988, Marcel Dekker, Inc., New York, N.Y., volume 1, p. 285).

[0791] A large variety of non-emulsifying materials are also included in emulsion formulations and contribute to the properties of emulsions. These include fats, oils, waxes, fatty acids, fatty alcohols, fatty esters, humectants, hydrophilic colloids, preservatives, and antioxidants (Block, in Pharmaceutical Dosage Forms, Lieberman, Rieger and Banker (Eds.), 1988, Marcel Dekker, Inc., New York, N.Y., volume 1, p. 335; Idson, in Pharmaceutical Dosage Forms, Lieberman, Rieger and Banker (Eds.), 1988, Marcel Dekker, Inc., New York, N.Y., volume 1, p. 199).

[0792] The application of emulsion formulations via dermatological, oral, and parenteral routes, and methods for their manufacture have been reviewed in the literature (see e.g., Ansel's Pharmaceutical Dosage Forms and Drug Delivery Systems, Allen, LV., Popovich N G., and Ansel H C., 2004, Lippincott Williams & Wilkins (8th ed.), New York, NY; Idson, in Pharmaceutical Dosage Forms, Lieberman, Rieger and Banker (Eds.), 1988, Marcel Dekker, Inc., New York, N.Y., volume 1, p. 199).

ii. Microemulsions

[0793] In one embodiment of the present invention, the compositions of modulators are formulated as microemulsions. A microemulsion can be defined as a system of water, oil, and amphiphile which is a single optically isotropic and thermodynamically stable liquid solution (see e.g., Ansel's Pharmaceutical Dosage Forms and Drug Delivery Systems, Allen, LV., Popovich N G., and Ansel H C., 2004, Lippincott Williams & Wilkins (8th ed.), New York, NY; Rosoff, in Pharmaceutical Dosage Forms, Lieberman, Rieger and Banker (Eds.), 1988, Marcel Dekker, Inc., New York, N.Y., volume 1, p. 245). Typically microemulsions are systems that are prepared by first dispersing an oil in an aqueous surfactant solution and then adding a sufficient amount of a fourth component, generally an intermediate chain-length alcohol to form a transparent system. Therefore, microemulsions have also been described as thermodynamically stable, isotropically clear dispersions of two immiscible liquids that are stabilized by interfacial films of surface-active molecules (Leung and Shah, in: Controlled Release of Drugs: Polymers and Aggregate Systems, Rosoff, M., Ed., 1989, VCH Publishers, New York, pages 185-215).

iii. Microparticles

[0794] An modulator of the invention may be incorporated into a particle, e.g., a microparticle. Microparticles can be produced by spray-drying, but may also be produced by other methods including lyophilization, evaporation, fluid bed drying, vacuum drying, or a combination of these techniques.

iv. Penetration Enhancers

[0795] In one embodiment, the present invention employs various penetration enhancers to effect the efficient delivery of modulators, e.g., nucleic acids, particularly iRNAs, to the skin of animals. Most drugs are present in solution in both ionized and nonionized forms. However, usually only lipid soluble or lipophilic drugs readily cross cell membranes. It has been discovered that even non-lipophilic drugs can cross cell membranes if the membrane to be crossed is treated with a penetration enhancer. In addition to aiding the diffusion of non-lipophilic drugs across cell membranes, penetration enhancers also enhance the permeability of lipophilic drugs.

[0796] Penetration enhancers can be classified as belonging to one of five broad categories, i.e., surfactants, fatty acids, bile salts, chelating agents, and non-chelating non-surfactants (see e.g., Malmsten, M. Surfactants and polymers in drug delivery, Informa Health Care, New York, NY, 2002; Lee et al., Critical Reviews in Therapeutic Drug Carrier Systems, 1991, p. 92). Each of the above mentioned classes of penetration enhancers and their use in manufacture of pharmaceutical compositions and delivery of pharmaceutical agents are well known in the art.

v. Excipients

[0797] In contrast to a carrier compound, a “pharmaceutical carrier” or “excipient” is a pharmaceutically acceptable solvent, suspending agent, or any other pharmacologically inert vehicle for delivering one or more modulators to an animal. The excipient can be liquid or solid and is selected, with the planned manner of administration in mind, so as to provide for the desired bulk, consistency, etc., when combined with a nucleic acid and the other components of a given pharmaceutical composition. Such agent are well known in the art.

vi. Other Components

[0798] The compositions of the present invention can additionally contain other adjunct components conventionally found in pharmaceutical compositions, at their art-established usage levels. Thus, for example, the compositions can contain additional, compatible, pharmaceutically-active materials such as, for example, antipruritics, astringents, local anesthetics or anti-inflammatory agents, or can contain additional materials useful in physically formulating various dosage forms of the compositions of the present invention, such as dyes, flavoring agents, preservatives, antioxidants, opacifiers, thickening agents and stabilizers. However, such materials, when added, should not unduly interfere with the biological activities of the components of the compositions of the present invention. The formulations can be sterilized and, if desired, mixed with auxiliary agents, e.g., lubricants, preservatives, stabilizers, wetting agents, emulsifiers, salts for influencing osmotic pressure, buffers, colorings, flavorings, or aromatic substances, and the like which do not deleteriously interact with the nucleic acid(s) of the formulation.

[0799] Aqueous suspensions can contain substances which increase the viscosity of the suspension including, for example, sodium carboxymethylcellulose, sorbitol, or dextran. The suspension can also contain stabilizers.

[0800] In some embodiments, pharmaceutical compositions featured in the invention include (a) one or more antisense polynucleotide agents and (b) one or more agents which function by a non-antisense inhibition mechanism and which are useful in treating an INHBE-associated disorder, e.g., a metabolic disorder.

[0801] Toxicity and prophylactic efficacy of such compounds can be determined by standard pharmaceutical procedures in cell cultures or experimental animals, e.g., for determining the LD50 (the dose lethal to 50% of the population) and the ED50 (the dose prophylactically effective in 50% of the population). The dose ratio between toxic and therapeutic effects is the therapeutic index and it can be expressed as the ratio LD50/ED50. Compounds that exhibit high therapeutic indices are preferred.

[0802] The data obtained from cell culture assays and animal studies can be used in formulating a range of dosage for use in humans. The dosage of compositions featured herein in the invention lies generally within a range of circulating concentrations that include the ED50, such as, an ED80 or ED90, with little or no toxicity. The dosage can vary within this range depending upon the dosage form employed and the route of administration utilized. For any compound used in the methods featured in the invention, the prophylactically effective dose can be estimated initially from cell culture assays. A dose can be formulated in animal models to achieve a circulating plasma concentration range of the compound or, when appropriate, of the polypeptide product of a target sequence (e.g., achieving a decreased concentration of the polypeptide) that includes the IC50 (i.e., the concentration of the test compound which achieves a half-maximal inhibition of symptoms) or higher levels of inhibition as determined in cell culture. Such information can be used to more accurately determine useful doses in humans. Levels in plasma can be measured, for example, by high performance liquid chromatography.

[0803] In addition to their administration, as discussed above, the modulators featured in the invention can be administered in combination with other known agents used for the prevention or treatment of an INHBE-associated disorder, e.g., metabolic disorder. In any event, the administering physician can adjust the amount and timing of iRNA administration on the basis of results observed using standard measures of efficacy known in the art or described herein.

### VI. Methods For Inhibiting INHBE Expression and/or Activity

[0804] The present invention also provides methods of inhibiting expression and/or activity of INHBE in a cell. The methods include contacting a cell with a modulator, e.g., double stranded RNA agent, antisense polynucleotide agent, an antibody, a guideRNA effecting ADAR editing, or a guideRNA affecting CRISPR editing, in an amount effective to inhibit expression and/or activity of INHBE in the cell, thereby inhibiting expression and/or activity of INHBE in the cell. In some embodiments of the disclosure, expression of an INHBE gene is inhibited preferentially in the liver (e.g., hepatocytes).

[0805] Contacting of a cell with a modulator, may be done in vitro or in vivo. Contacting a cell in vivo with the modulator includes contacting a cell or group of cells within a subject, e.g., a human subject, with the modulator. Combinations of in vitro and in vivo methods of contacting a cell are also possible. Contacting a cell may be direct or indirect, as discussed above. Furthermore, contacting a cell may be accomplished via a targeting ligand, including any ligand described herein or known in the art. In some embodiments, the targeting ligand is a carbohydrate moiety, e.g., a GalNAc₃ ligand, or any other ligand that directs the modulator agent to a site of interest.

[0806] The term “inhibiting,” as used herein, is used interchangeably with “reducing,” “silencing,” “downregulating”, “suppressing”, and other similar terms, and includes any level of inhibition.

[0807] The phrase “inhibiting expression and/or activity of INHBE” is intended to refer to inhibition of expression of any INHBE (such as, e.g., a mouse INHBE gene, a rat INHBE gene, a monkey INHBE gene, or a human INHBE gene) as well as variants or mutants of an INHBE gene. Thus, the INHBE gene may be a wild-type INHBE gene, a mutant INHBE gene, or a transgenic INHBE gene in the context of a genetically manipulated cell, group of cells, or organism.

[0808] “Inhibiting expression and/or activity of INHBE” includes any level of inhibition of an INHBE gene, e.g., at least partial suppression of the expression and/or activity of INHBE. The expression and/or activity of INHBE may be assessed based on the level, or the change in the level, of any variable associated with INHBE gene expression, e.g., INHBE mRNA level or INHBE protein level. It is understood that INHBE is expressed predominantly in the liver.

[0809] The expression and/or activity of INHBE may also be assessed indirectly based on other variables associated with INHBE gene expression, e.g., level of inhibin subunit beta E expression in the cytoplasma, nuclear localization of inhibin subunit beta E, or expression of certain target genes or other genes under transcription control of inhibin subunit beta E.

[0810] Inhibition may be assessed by a decrease in an absolute or relative level of one or more variables that are associated with INHBE expression and/or activity compared with a control level. The control level may be any type of control level that is utilized in the art, e.g., a pre-dose baseline level, or a level determined from a similar subject, cell, or sample that is untreated or treated with a control (such as, e.g., buffer only control or inactive agent control).

[0811] In some embodiments of the methods of the invention, expression and/or activity of INHBE is inhibited by at least 50%, 55%, 60%, 65%, 70%, 75%, 80%, 85%, 90%, or 95%, or to below the level of detection of the assay. In some embodiments, expression and/or activity of INHBE is inhibited by at least 70%. It is further understood that inhibition of INHBE expression and/or activity in certain tissues, e.g., in liver, without a significant inhibition of expression in other tissues, e.g., brain, may be desirable.

[0812] In certain embodiments, inhibition of expression and/or activity in vivo is determined by knockdown of the human gene in a rodent expressing the human gene, e.g., an AAV-infected mouse expressing the human target gene (i.e., INHBE), e.g., when administered as a single dose, e.g., at 3 mg/kg at the nadir of RNA expression. Knockdown of expression of an endogenous gene in a model animal system can also be determined, e.g., after administration of a single dose at, e.g., 3 mg/kg at the nadir of RNA expression. Such systems are useful when the nucleic acid sequence of the human gene and the model animal gene are sufficiently close such that the human iRNA provides effective knockdown of the model animal gene. RNA expression in liver is determined using the PCR methods provided in Example 2.

[0813] Inhibition of the expression and/or activity of INHBE may be manifested by a reduction of the amount of mRNA expressed by a first cell or group of cells (such cells may be present, for example, in a sample derived from a subject) in which INHBE is transcribed and which has or have been treated (e.g., by contacting the cell or cells with a modulator of the invention, or by administering a modulator of the invention to a subject in which the cells are or were present) such that the expression of an INHBE gene is inhibited, as compared to a second cell or group of cells substantially identical to the first cell or group of cells but which has not or have not been so treated (control cell(s) not treated with a modulator or not treated with a modulator targeted to the gene of interest). In some embodiments, the inhibition is assessed by the method provided in Example 2 using a 10 nM siRNA concentration in the species matched cell line and expressing the level of mRNA in treated cells as a percentage of the level of mRNA in control cells, using the following formula:

$$\frac{( mRNA in control cells ) - ( mRNA in treated cells )}{( mRNA in control cells )} \cdot 100 \%$$

[0814] In other embodiments, inhibition of the expression and/or activity of INHBE may be assessed in terms of a reduction of a parameter that is functionally linked to INHBE gene expression, e.g., INHBE protein level in blood or serum from a subject. INHBE gene silencing may be determined in any cell expressing INHBE, either endogenous or heterologous from an expression construct, and by any assay known in the art.

[0815] Inhibition of the expression and/or activity of an INHBE protein may be manifested by a reduction in the level of the INHBE protein that is expressed by a cell or group of cells or in a subject sample (e.g., the level of protein in a blood sample derived from a subject). As explained above, for the assessment of mRNA suppression, the inhibition of protein expression levels in a treated cell or group of cells may similarly be expressed as a percentage of the level of protein in a control cell or group of cells, or the change in the level of protein in a subject sample, e.g., blood or serum derived therefrom.

[0816] A control cell, a group of cells, or subject sample that may be used to assess the inhibition of the expression and/or activity of INHBE includes a cell, group of cells, or subject sample that has not yet been contacted with a modulator agent of the invention. For example, the control cell, group of cells, or subject sample may be derived from an individual subject (e.g., a human or animal subject) prior to treatment of the subject with a modulator or an appropriately matched population control.

[0817] The level of INHBE mRNA that is expressed by a cell or group of cells may be determined using any method known in the art for assessing mRNA expression. In one embodiment, the level of expression of INHBE in a sample is determined by detecting a transcribed polynucleotide, or portion thereof, e.g., mRNA of the INHBE gene. RNA may be extracted from cells using RNA extraction techniques including, for example, using acid phenol/guanidine isothiocyanate extraction (RNAzol B; Biogenesis), RNeasy™ RNA preparation kits (Qiagen®) or PAXgene™ (PreAnalytix™, Switzerland). Typical assay formats utilizing ribonucleic acid hybridization include nuclear run-on assays, RT-PCR, RNase protection assays, northern blotting, in situ hybridization, and microarray analysis.

[0818] In some embodiments, the level of expression of INHBE is determined using a nucleic acid probe. The term “probe”, as used herein, refers to any molecule that is capable of selectively binding to a specific INHBE. Probes can be synthesized by one of skill in the art, or derived from appropriate biological preparations. Probes may be specifically designed to be labeled. Examples of molecules that can be utilized as probes include, but are not limited to, RNA, DNA, proteins, antibodies, and organic molecules.

[0819] Isolated mRNA can be used in hybridization or amplification assays that include, but are not limited to, Southern or northern analyses, polymerase chain reaction (PCR) analyses and probe arrays. One method for the determination of mRNA levels involves contacting the isolated mRNA with a nucleic acid molecule (probe) that can hybridize to INHBE mRNA. In one embodiment, the mRNA is immobilized on a solid surface and contacted with a probe, for example by running the isolated mRNA on an agarose gel and transferring the mRNA from the gel to a membrane, such as nitrocellulose. In an alternative embodiment, the probe(s) are immobilized on a solid surface and the mRNA is contacted with the probe(s), for example, in an Affymetrix® gene chip array. A skilled artisan can readily adapt known mRNA detection methods for use in determining the level of INHBE mRNA.

[0820] An alternative method for determining the level of expression of INHBE in a sample involves the process of nucleic acid amplification or reverse transcriptase (to prepare cDNA) of for example mRNA in the sample, e.g., by RT-PCR (the experimental embodiment set forth in Mullis, 1987, U.S. Pat. No. 4,683,202), ligase chain reaction (Barany (1991) Proc. Natd. Acad. Sci. USA 88:189-193), self sustained sequence replication (Guatelli et al. (1990) Proc. Natd. Acad. Sci. USA 87:1874-1878), transcriptional amplification system (Kwoh et al. (1989) Proc. Natd. Acad. Sci. USA 86:1173-1177), Q-Beta Replicase (Lizardi et al. (1988) Bio/Technology 6:1197), rolling circle replication (Lizardi et al., U.S. Pat. No. 5,854,033) or any other nucleic acid amplification method, followed by the detection of the amplified molecules using techniques well known to those of skill in the art. These detection schemes are especially useful for the detection of nucleic acid molecules if such molecules are present in very low numbers. In particular aspects of the invention, the level of expression of INHBE is determined by quantitative fluorogenic RT-PCR (i.e., the TaqMan™ System). In some embodiments, expression level is determined by the method provided in Example 2 using, e.g., a 10 nM siRNA concentration, in the species matched cell line.

[0821] The expression levels of INHBE mRNA may be monitored using a membrane blot (such as used in hybridization analysis such as northern, Southern, dot, and the like), or microwells, sample tubes, gels, beads or fibers (or any solid support comprising bound nucleic acids). See U.S. Pat. Nos. 5,770,722, 5,874,219, 5,744,305, 5,677,195 and 5,445,934, which are incorporated herein by reference. The determination of INHBE expression level may also comprise using nucleic acid probes in solution.

[0822] In some embodiments, the level of mRNA expression is assessed using branched DNA (bDNA) assays or real time PCR (qPCR). The use of these methods is described and exemplified in the Examples presented herein. In some embodiments, expression level is determined by the method provided in Example 2 using a 10 nM siRNA concentration in the species matched cell line.

[0823] The level of INHBE protein expression may be determined using any method known in the art for the measurement of protein levels. Such methods include, for example, electrophoresis, capillary electrophoresis, high performance liquid chromatography (HPLC), thin layer chromatography (TLC), hyperdiffusion chromatography, fluid or gel precipitin reactions, absorption spectroscopy, a colorimetric assays, spectrophotometric assays, flow cytometry, immunodiffusion (single or double), immunoelectrophoresis, western blotting, radioimmunoassay (RIA), enzyme-linked immunosorbent assays (ELISAs), immunofluorescent assays, electrochemiluminescence assays, and the like.

[0824] In some embodiments, the efficacy of the methods of the invention are assessed by a decrease in INHBE mRNA or protein level (e.g., in a liver biopsy).

[0825] In some embodiments of the methods of the invention, the modulator is administered to a subject such that the modulator is delivered to a specific site within the subject. The inhibition of expression and/or activity of INHBE may be assessed using measurements of the level or change in the level of INHBE mRNA or INHBE protein in a sample derived from fluid or tissue from the specific site within the subject (e.g., liver or blood).

[0826] As used herein, the terms detecting or determining a level of an analyte are understood to mean performing the steps to determine if a material, e.g., protein, RNA, is present. As used herein, methods of detecting or determining include detection or determination of an analyte level that is below the level of detection for the method used.

### VII. Prophylactic and Treatment Methods of the Invention

[0827] The present invention also provides methods of using a modulator of the invention or a composition containing modulator of the invention to inhibit expression and/or activity of INHBE, thereby preventing or treating an INHBE-associated disorder, e.g., metabolic disorder, e.g., metabolic syndrome, a disorder of carbohydrates, e.g., type II diabetes, pre-diabetes, a lipid metabolism disorder, e.g., a hyperlipidemia, hypertension, a cardiovascular disease, a disorders of body weight. In the methods of the invention the cell may be contacted with the modulator in vitro or in vivo, i.e., the cell may be within a subject.

[0828] A cell suitable for treatment using the methods of the invention may be any cell that expresses an INHBE gene, e.g., a liver cell. A cell suitable for use in the methods of the invention may be a mammalian cell, e.g., a primate cell (such as a human cell, including human cell in a chimeric non-human animal, or a non-human primate cell, e.g., a monkey cell or a chimpanzee cell), or a non-primate cell. In certain embodiments, the cell is a human cell, e.g., a human liver cell. In the methods of the invention, INHBE expression is inhibited in the cell by at least 50, 55, 60, 65, 70, 75, 80, 85, 90, or 95, or to a level below the level of detection of the assay.

[0829] The in vivo methods of the invention may include administering to a subject a composition containing a modulator, such as an oligonucleotide, e.g., where the oligonucleotide includes a nucleotide sequence that is complementary to at least a part of an RNA transcript of the INHBE gene of the mammal to which the RNAi agent is to be administered. The composition can be administered by any means known in the art including, but not limited to oral, intraperitoneal, or parenteral routes, including intracranial (e.g., intraventricular, intraparenchymal, and intrathecal), intravenous, intramuscular, subcutaneous, transdermal, airway (aerosol), nasal, rectal, intraocular (e.g., periocular, conjunctival, subtenon, intracameral, intravitreal, intraocular, anterior or posterior juxtascleral, subretinal, subconjunctival, retrobulbar, or intracanalicular injection), intravenous, intramuscular, subcutaneous, transdermal, airway (aerosol), and topical (including buccal and sublingual) administration.

[0830] In certain embodiments, the compositions are administered by intravenous infusion or injection. In certain embodiments, the compositions are administered by subcutaneous injection. In certain embodiments, the compositions are administered by intramuscular injection.

[0831] The mode of administration may be chosen based upon whether local or systemic treatment is desired and based upon the area to be treated. The route and site of administration may be chosen to enhance targeting.

[0832] In one aspect, the present invention also provides methods for inhibiting the expression and/or activity of INHBE in a mammal. The methods include administering to the mammal a composition comprising a modulator, such as an oligonucleotide, e.g., an oligonucleotide that targets an INHBE gene, in a cell of the mammal and maintaining the mammal for a time sufficient to obtain degradation of the mRNA transcript of the INHBE gene, thereby inhibiting expression and/or activity of INHBE in the cell. Reduction in expression and/or activity can be assessed by any methods known in the art and by methods, e.g. qRT-PCR, described herein, e.g., in Example 2. Reduction in protein production can be assessed by any methods known it the art, e.g. ELISA. In certain embodiments, a puncture liver biopsy sample serves as the tissue material for monitoring the reduction in the INHBE gene or protein expression. In other embodiments, a blood sample serves as the subject sample for monitoring the reduction in the INHBE protein expression and/or actvity.

[0833] The present invention further provides methods of treatment in a subject in need thereof, e.g., a subject diagnosed with an INHBE-associated disorder, such as a metabolic disorder, e.g., metabolic syndrome, a disorder of carbohydrates, e.g., type II diabetes, pre-diabetes, a lipid metabolism disorder, e.g., a hyperlipidemia, hypertension, a cardiovascular disease, a disorders of body weight.

[0834] The present invention further provides methods of prophylaxis in a subject in need thereof. The treatment methods of the invention include administering a modulator of the invention to a subject, e.g., a subject that would benefit from a reduction of INHBE expression, in a prophylactically effective amount of a dsRNA targeting an INHBE gene or a pharmaceutical composition comprising a modulator of the invention.

[0835] In one aspect, the present invention provides methods of treating a subject having a disorder that would benefit from reduction in INHBE expression and/or activity, e.g., an INHBE-associated disorder, such as a metabolic disorder, e.g., diabetes.

[0836] Treatment of a subject that would benefit from a reduction and/or inhibition of INHBE expression and/or activity includes therapeutic treatment (e.g., a subject is having a metabolic disorder) and prophylactic treatment (e.g., the subject is not having a metablic disorder or a subject may be at risk of developing a metabolic disorder).

[0837] In some embodiments, the INHBE-associated disorder is a metabolic disorder. Examples of metablic disorder include but are not limited to, metabolic syndrome, a disorder of carbohydrates, e.g., type II diabetes, pre-diabetes, a lipid metabolism disorder, e.g., a hyperlipidemia, hypertension, a cardiovascular disease, a disorders of body weight.

[0838] In some embodiments, the INHBE-associated disorder is metabolic syndrome.

[0839] In some embodiments, the modulator is administered to a subject in an amount effective to inhibit INHBE expression and/or activity in a cell within the subject. The amount effective to inhibit INHBE expression and/or activity in a cell within a subject may be assessed using methods discussed above, including methods that involve assessment of the inhibition of INHBE mRNA, INHBE protein, or related variables, such as waist circunference.

[0840] With respect to oligonucleotide of the invention, an oligonucleotide of the invention may be administered as a “free oligonucleotide.” A free oligonucleotide is administered in the absence of a pharmaceutical composition. The naked oligonucleotide may be in a suitable buffer solution. The buffer solution may comprise acetate, citrate, prolamine, carbonate, or phosphate, or any combination thereof. In one embodiment, the buffer solution is phosphate buffered saline (PBS). The pH and osmolarity of the buffer solution containing the oligonucleotide can be adjusted such that it is suitable for administering to a subject. Alternatively, an oligonucleotide of the invention may be administered as a pharmaceutical composition, such as an oligonucleotide liposomal formulation.

[0841] Subjects that would benefit from an inhibition of INHBE expression and/or activity are subjects susceptible to or diagnosed with an INHBE-associated disorder, such as a metablic disorder, e.g., metabolic syndrome, a disorder of carbohydrates, e.g., type II diabetes, pre-diabetes, a lipid metabolism disorder, e.g., a hyperlipidemia, hypertension, a cardiovascular disease, a disorders of body weight. In an embodiment, the method includes administering a composition featured herein such that expression and/or activity of INHBE is decreased, such as for about 1, 2, 3, 4, 5, 6, 1-6, 1-3, or 3-6 months per dose. In certain embodiments, the composition is administered once every 3-6 months.

[0842] In one embodiment, the modulators useful for the methods and compositions featured herein specifically target RNAs (primary or processed) of the target INHBE gene. Compositions and methods for inhibiting the expression of these genes using iRNAs can be prepared and performed as described herein.

[0843] Administration of the modulator according to the methods of the invention may result prevention or treatment of an INHBE-associated disorder, e.g., a metablic disorder, e.g., metabolic syndrome, a disorder of carbohydrates, e.g., type II diabetes, pre-diabetes, a lipid metabolism disorder, e.g., a hyperlipidemia, hypertension, a cardiovascular disease, a disorders of body weight. Subjects can be administered a therapeutic amount of modulator, such as about 0.01 mg/kg to about 200 mg/kg.

[0844] In one embodiment, the modulator is administered subcutaneously, i.e., by subcutaneous injection. One or more injections may be used to deliver the desired dose of modulator to a subject. The injections may be repeated over a period of time.

[0845] The administration may be repeated on a regular basis. In certain embodiments, after an initial treatment regimen, the treatments can be administered on a less frequent basis. A repeat-dose regimen may include administration of a therapeutic amount of modulator on a regular basis, such as once per month to once a year. In certain embodiments, the modulator is administered about once per month to about once every three months, or about once every three months to about once every six months.

[0846] The invention further provides methods and uses of a modulator or a pharmaceutical composition thereof for treating a subject that would benefit from reduction and/or inhibition of INHBE expression and/or activity, e.g., a subject having an INHBE-associated disorder, in combination with other pharmaceuticals and/or other therapeutic methods, e.g., with known pharmaceuticals and/or known therapeutic methods, such as, for example, those which are currently employed for treating these disorders.

[0847] Accordingly, in some aspects of the invention, the methods which include administration of a modulator of the invention, further include administering to the subject one or more additional therapeutic agents.

[0848] For example, in certain embodiments, a modulator of the invention is administered in combination with, e.g., an agent useful in treating an INHBE-associated disorder as described herein or otherwise known in the art. For example, additional agents and treatments suitable for treating a subject that would benefit from reducton in INHBE expression and/or activity, e.g., a subject having an INHBE-associated disorder, may include agents currently used to treat symptoms of INHBE-associated disorder.

[0849] Examples of the additional therapeutic agents which can be used with a modulator of the invention include, but are not limited to, insulin, a glucagon-like peptide 1 agonist (e.g., exenatide, liraglutide, dulaglutide, semaglutide, and pramlintide, a sulfonylurea (e.g., chlorpropamide, glipizide), a seglitinide (e.g., repaglinide, nateglinidie), biguanides (e.g., metformin), a thiazolidinedione, e.g, rosiglitazone, troglitazone, an alpha-glucosidase inhibitor (e.g., acarbose and meglitol), an SGLT2 inhibitor (e.g., dapagliflozin), a DPP-4 inhibitor (e.g., linagliptin), or an HMG-CoA reductase inhibitor, e.g., statins, such as atorvastatin (Lipitor), fluvastatin (Lescol), lovastatin (Mevacor), lovastatin extended-release (Altoprev), pitavastatin (Livalo), pravastatin (Pravachol), rosuvastatin (Crestor), and simvastatin (Zocor).

[0850] The modulator and an additional therapeutic agent and/or treatment may be administered at the same time and/or in the same combination, e.g., parenterally, or the additional therapeutic agent can be administered as part of a separate composition or at separate times and/or by another method known in the art or described herein.

### VIII. Kits

[0851] In certain aspects, the instant disclosure provides kits that include a suitable container containing a pharmaceutical formulation of a modulator of the invention.

[0852] Such kits include one or more modulator(s) and instructions for use, e.g., instructions for administering a prophylactically or therapeutically effective amount of modulator(s). The modulator may be in a vial or a pre-filled syringe. The kits may optionally further comprise means for administering the modulator (e.g., an injection device, such as a pre-filled syringe), or means for measuring the inhibition of INHBE (e.g., means for measuring the inhibition of INHBE mRNA, INHBE protein, and/or INHBE activity). Such means for measuring the inhibition of INHBE may comprise a means for obtaining a sample from a subject, such as, e.g., a plasma sample. The kits of the invention may optionally further comprise means for determining the therapeutically effective or prophylactically effective amount.

[0853] In certain embodiments the individual components of the pharmaceutical formulation may be provided in one container, e.g., a vial or a pre-filled syringe. Alternatively, it may be desirable to provide the components of the pharmaceutical formulation separately in two or more containers, e.g., one container for modulator preparation, and at least another for a carrier compound. The kit may be packaged in a number of different configurations such as one or more containers in a single box. The different components can be combined, e.g., according to instructions provided with the kit. The components can be combined according to a method described herein, e.g., to prepare and administer a pharmaceutical composition. The kit can also include a delivery device.

[0854] This invention is further illustrated by the following examples which should not be construed as limiting. The entire contents of all references, patents and published patent applications cited throughout this application, as well as the informal Sequence Listing and Figures, are hereby incorporated herein by reference.

### EXAMPLES

### Example 1. Identification of Association of INHBE Loss-of-Function with Waist-to-Hip Ratio in UK Biobank

[0855] Abdominal obesity is the most prevalent manifestation of metabolic syndrome (Després J. and Lemieux I. Nature 2006; 444:881-887) and is recognized as a contributor to cardiovascular disease and metabolic risk beyond body mass index (BMI) (Neeland I J et al. Lancet Diabetes & Endocrinology 2019; 7(9):715-725). Waist-to-hip ratio adjusted for BMI (WHRadjBMI) reflects abdominal adiposity and correlates with direct imaging of abdominal fat. Mendelian randomization studies have shown a causal relationship between WHRadjBMI and risk of type 2 diabetes and coronary heart disease along with ischemic stroke, glycemic traits and circulating lipids (Emdin C A et al. JAMA 2017; 317(6):626-634; Dale C E et al. Circulation 2017; 135(24):2373-2388).

[0856] Rare genetic variants were tested for association with waist-to-hip ratio adjusted for BMI using exome sequencing data from the UK Biobank (UKBB). UKBB, a large long-term biobank study in the United Kingdom (UK) is investigating the respective contributions of genetic predisposition and environmental exposure (including nutrition, lifestyle, medications etc.) to the development of disease (see, e.g., www.ukbiobank.ac.uk). The study is following about 500,000 volunteers in the UK, enrolled at ages from 40 to 69. Initial enrollment took place over four years from 2006, and the volunteers will be followed for at least 30 years thereafter. A plethora of phenotypic data has been collected including anthropometric measurements such as waist and hip circumference. Recently, the exome sequencing data (or the portion of the genomes composed of exons) from about 450,000 participants in the study has been obtained.

[0857] These whole exome sequences were used to identify rare predicted loss-of-function (pLOF) variants (i.e., frameshift, stop gain, splice donor or splice acceptor variants) called as high confidence by LOFTEE. WHR adjBMI were calculated for participants using manual measurements for waist circumference, hip circumference, and body mass index (BMI) which were taken at their UKBB assessment. WHR was calculated as the ratio of these two measurements. Using these data, along with age at recruitment and sex, a linear model was built modeling WHR (WHR˜Age+Sex+BMI). WHR adjBMI was defined using the residuals from this model.

[0858] Gene-based collapsing tests (i.e., burden tests) were used to look for associations between rare (minor allele frequency≤1%) pLOF variants and WHRadjBMI. Burden testing was performed in the unrelated White population (n=363,973) adjusting for age and genetic ancestry via 30 principal components. INHBE pLOF associated with a 0.22 standard deviation decrease in WHRadjBMI (Table A). INHBE was tested for association with additional quantitative traits and we detected associations with birth weight, WHR (not adjusted for BMI), triglycerides and HDL cholesterol (Table A). INHBE pLOF also has a lower odds ratio for hypertension, coronary heart disease and T2D (Table B)

[0859] The most common INHBE pLOF variant in the UKBB exome-sequencing data was a splice acceptor variant (rs150777893) carried by 536 out of 620 pLOF carriers. Tested as a single variant, rs150777893 significantly associated with decreased WHRadj BMI (Table C).

TABLE A
Association of INHBE pLOF with WHRadj BMI and other traits

| | | | Effect | N carrier |
|---|---|---|---|---|
| | Variant set | pvalue | (SD) | measured |
| WaistHipRatioAdjBMI | INHBE pLOF | 4.76E−08 | −0.22 | 618 |
| EarlyLife_Birth_weight | INHBE pLOF | 7.01E−07 | 0.26 | 345 |
| WaistHipRatio | INHBE pLOF | 3.45E−05 | −0.13 | 619 |
| Blood_Biochemistry_Triglycerides | INHBE pLOF | 0.001 | −0.13 | 594 |
| Blood_Biochemistry_HDL_cholesterol | INHBE pLOF | 0.01 | 0.10 | 550 |

TABLE B
Association of INHBE pLOF with hypertension, heart disease and T2D

| | | Odds ratio | n carrier | n |
|---|---|---|---|---|
| phenotype | pvalue | (95% CI) | cases | expected |
| I10_essential_primary_hypertension | 0.10 | 0.86 | 186 | 202.31 |
| | | (0.71, 1.03) | | |
| 125_chronic_ischaemic_heart_disease | 0.21 | 0.83 | 56 | 61.31 |
| | | (0.63, 1.11) | | |
| E11_non_insulin_dependent_diabetes | 0.36 | 0.87 | 45 | 50.30 |
| | | (0.64, 1.18) | | |

TABLE C
Association of splice acceptor variant rs150777893 with WHRadjBMI

| | | | | | | | | | | | N |
|---|---|---|---|---|---|---|---|---|---|---|---|
| | | | | | | Effect | | | | MAF | white |
| | chrom | pos | ref | alt | pvalue | (SD) | rsid | gene | consequence | white | carriers |
| WHRAdjBMI | 12 | 57456093 | G | C | 3.75E−08 | −0.24 | rs150777893 | INHBE | splice | 0.07% | 539 |
| | | | | | | | | | acceptor | | |
| | | | | | | | | | variant | | |

### Example 2. iRNA Synthesis

### Source of Reagents

[0860] Where the source of a reagent is not specifically given herein, such reagent can be obtained from any supplier of reagents for molecular biology at a quality/purity standard for application in molecular biology.

siRNA Design

[0861] siRNAs targeting the inhibin subunit beta E gene (INHBE, human: NCBI refseqID NM_031479.5, NCBI Gene ID: 83729) were designed using custom R and Python scripts. The human NM_031479.5 mRNA has a length of 2460 bases.

[0862] Detailed lists of the unmodified INHBE sense and antisense strand nucleotide sequences are shown in Table 2. Detailed lists of the modified INHBE sense and antisense strand nucleotide sequences are shown in Table 3.

[0863] It is to be understood that, throughout the application, a duplex name without a decimal is equivalent to a duplex name with a decimal which merely references the batch number of the duplex. For example, AD-959917 is equivalent to AD-959917.1.

siRNA Synthesis

[0864] siRNAs were designed, synthesized, and prepared using methods known in the art.

[0865] Briefly, siRNA sequences were synthesized on a 1 μmol scale using a Mermade 192 synthesizer (BioAutomation) with phosphoramidite chemistry on solid supports. The solid support was controlled pore glass (500-1000 Å) loaded with a custom GalNAc ligand (3′-GalNAc conjugates), universal solid support (AM Chemicals), or the first nucleotide of interest. Ancillary synthesis reagents and standard 2-cyanoethyl phosphoramidite monomers (2′-deoxy-2′-fluoro, 2′-O-methyl, RNA, DNA) were obtained from Thermo-Fisher (Milwaukee, WI), Hongene (China), or Chemgenes (Wilmington, MA, USA). Additional phosphoramidite monomers were procured from commercial suppliers, prepared in-house, or procured using custom synthesis from various CMOs. Phosphoramidites were prepared at a concentration of 100 mM in either acetonitrile or 9:1 acetonitrile:DMF and were coupled using 5-Ethylthio-1H-tetrazole (ETT, 0.25 M in acetonitrile) with a reaction time of 400 s. Phosphorothioate linkages were generated using a 100 mM solution of 3-((Dimethylamino-methylidene) amino)-3H-1,2,4-dithiazole-3-thione (DDTT, obtained from Chemgenes (Wilmington, MA, USA)) in anhydrous acetonitrile/pyridine (9:1 v/v). Oxidation time was 5 minutes. All sequences were synthesized with final removal of the DMT group (“DMT-Off”).

[0866] Upon completion of the solid phase synthesis, solid-supported oligoribonucleotides were treated with 300 μL of Methylamine (40% aqueous) at room temperature in 96 well plates for approximately 2 hours to afford cleavage from the solid support and subsequent removal of all additional base-labile protecting groups. For sequences containing any natural ribonucleotide linkages (2′-OH) protected with a tert-butyl dimethyl silyl (TBDMS) group, a second deprotection step was performed using TEA.3HF (triethylamine trihydrofluoride). To each oligonucleotide solution in aqueous methylamine was added 200 μL of dimethyl sulfoxide (DMSO) and 300 μL TEA.3HF and the solution was incubated for approximately 30 mins at 60° C. After incubation, the plate was allowed to come to room temperature and crude oligonucleotides were precipitated by the addition of 1 mL of 9:1 acetontrile:ethanol or 1:1 ethanol:isopropanol. The plates were then centrifuged at 4° C. for 45 mins and the supernatant carefully decanted with the aid of a multichannel pipette. The oligonucleotide pellet was resuspended in 20 mM NaOAc and subsequently desalted using a HiTrap size exclusion column (5 mL, GE Healthcare) on an Agilent L C system equipped with an autosampler, UV detector, conductivity meter, and fraction collector. Desalted samples were collected in 96 well plates and then analyzed by LC-MS and UV spectrometry to confirm identity and quantify the amount of material, respectively.

[0867] Duplexing of single strands was performed on a Tecan liquid handling robot. Sense and antisense single strands were combined in an equimolar ratio to a final concentration of 10 μM in 1× PBS in 96 well plates, the plate sealed, incubated at 100° C. for 10 minutes, and subsequently allowed to return slowly to room temperature over a period of 2-3 hours. The concentration and identity of each duplex was confirmed and then subsequently utilized for in vitro screening assays.

### Example 3. In Vitro siRNA Screening Methods

### Cell Culture and 384-Well Transfections

[0868] Hep3b cells (ATCC, Manassas, VA) are grown to near confluence at 37° C. in an atmosphere of 5% CO₂ in Eagle's Minimum Essential Medium (Gibco) supplemented with 10% FBS (ATCC) before being released from the plate by trypsinization. Transfection is carried out by adding 7.5 I of Opti-MEM plus 0.1 μl of Lipofectamine RNAiMax per well (Invitrogen, Carlsbad CA. cat #13778-150) to 2.5 μl of each siRNA duplex to an individual well in a 384-well plate. The mixture is then incubated at room temperature for 15 minutes. Forty l of complete growth media without antibiotic containing ˜1.5×10′ cells are then added to the siRNA mixture. Cells are incubated for 24 hours prior to RNA purification. Single dose experiments are performed at 10 nM, 1 nM, and 0.1 nM final duplex concentration.

Total RNA isolation using DYNABEADS mRNA Isolation Kit (Invitrogen™, part #: 610-12)

[0869] Cells are lysed in 75 μl of Lysis/Binding Buffer containing 3 μL of beads per well and mixed for 10 minutes on an electrostatic shaker. The washing steps are automated on a Biotek EL406, using a magnetic plate support. Beads are washed (in 90 L) once in Buffer A, once in Buffer B, and twice in Buffer E, with aspiration steps in between. Following a final aspiration, complete 10 μL RT mixture is added to each well, as described below.

cDNA Synthesis Using ABI High Capacity cDNA Reverse Transcription Kit (Applied Biosystems, Foster City, CA, Cat #4368813)

[0870] A master mix of 1 μl 10× Buffer, 0.4 μl 25×dNTPs, 1 μl Random primers, 0.5 μl Reverse Transcriptase, 0.5 μl RNase inhibitor and 6.6 μl of H₂O per reaction are added per well. Plates are sealed, agitated for 10 minutes on an electrostatic shaker, and then incubated at 37 degrees C. for 2 hours. Following this, the plates are agitated at 80 degrees C. for 8 minutes.

### Real Time PCR

[0871] Two microlitre (μl) of cDNA are added to a master mix containing 0.5 μl of human GAPDH TaqMan Probe (4326317E), 0.5 μl human INHBE, 2 μl nuclease-free water and 5 μl Lightcycler 480 probe master mix (Roche Cat #04887301001) per well in a 384 well plates (Roche cat #04887301001). Real time PCR is done in a LightCycler480 Real Time PCR system (Roche).

[0872] To calculate relative fold change, data are analyzed using the AACt method and normalized to assays performed with cells transfected with 10 nM AD-1955, or mock transfected cells. IC₅₀s are calculated using a 4 parameter fit model using XLFit and normalized to cells transfected with AD-1955 or mock-transfected. The sense and antisense sequences of AD-1955 are: sense: cuuAcGcuGAGuAcuucGAdTsdT and antisense UCGAAGuACUcAGCGuAAGdTsdT.

### Example 4. Antisense Polynucleotide Agent Synthesis

Bioinformatics A set of antisense polynucleotide agents targeting the inhibin subunit beta E gene (INHBE, human: NCBI refseqID NM_031479.5, NCBI Gene ID: 83729) were designed and synthesized using standard synthesis methods well known in the art.

[0873] A detailed list of the unmodified nucleotide sequences of antisense molecules targeting INHBE is shown in Table 4 and a detailed list of the modified nucleotide sequences of antisense molecules targeting INHBE is shown in Table 5.

### Example 5. In Vitro Fluorescence-Based Branched DNA (bDNA) Screening Assay

### Summary

[0874] A panel of 32 human cell lines was screened for expression of INHBE by measuring the level of INHBE transcript using a fluorescence-based branched DNA (bDNA) assay. A cell line (Hep3B) with sufficient expression (at least 50-fold above background relative luminescence units (RLUs)) was identified as an in vitro model to screen INHBE siRNAs and ASOs for target knockdown.

### Materials and Methods

[0875] Quantigene probesets were designed for human INHBE and human GapDH mRNA (housekeeper gene for normalization) and to Ahsal, which was used as a positive control in screens. Probeset oligos were ordered from ThermoFisher Scientific and synthesized by Metabion. Probeset sequences, without their proprietary parts, for INHBE, GapdDH and Ahsal.

[0876] To identify a cell line with sufficient target expression for screening (RLUs at least ˜50-fold above background), lysates from 32 human cell lines were tested for INHBE target expression by Quantigene Singleplex Assay. Of each cell line, two different volumes of lysate were analyzed with a concentration of 200,000 cells/mL lysate. The Quantigene assay was performed according to the manufacturer's protocol for Quantigene Singleplex. Luminescence was read using 1420 Luminescence Counter (WALLAC VICTOR Light, Perkin Elmer, Rodgau-Jugesheim, Germany) following 30 minutes incubation at RT in the dark.

### In Vitro Screen & Dose Response in Hep3B Cells

[0877] Hep3b cells (ATCC, Manassas, VA) are grown to near confluence at 37° C. in an atmosphere of 5% CO₂ in Eagle's Minimum Essential Medium (Gibco) supplemented with 10% FBS (ATCC) before being released from the plate by trypsinization.

[0878] For transfection of Hep3B cells, cells were seeded at a density of 15,000 cells/well into 96-well tissue culture plates (#655180, GBO, Germany). Transfection of siRNAs was carried out with Lipofectamine RNAiMax, antisense oligonucleotides (ASOs) were transfected with Lipofectamine 2000 (both from Invitrogen/Life Technologies, Karlsruhe, Germany) according to manufacturer's instructions for reverse transfection. The in vitro screen was performed with siRNAs/ASOs in quadruplicates at 10 nM and 1 nM, with siRNAs targeting Ahsal, Firefly-Luciferase and Renilla-Luciferase as unspecific controls and a mock transfection. After 24 hours of incubation with siRNAs/ASOs, medium was removed and cells were lysed in 150 μl Medium-Lysis Mixture (1 volume lysis buffer, 2 volumes cell culture medium) and then incubated at 53° C. for 30 minutes. bDNA assay was performed according to manufacturer's instructions with a probeset directed to human INHBE. Luminescence was read using 1420 Luminescence Counter (WALLAC VICTOR Light, Perkin Elmer, Rodgau-Jugesheim, Germany) following 30 minutes incubation at RT in the dark.

[0879] The Ahsa1 siRNA served as an unspecific control for INHBE target mRNA expression and as positive control for transfection efficiency with regards to Ahsa1 mRNA level. By hybridization with an Ahsa1 probeset, mock-transfection served as controls for Ahsa1 mRNA level. Transfection efficiency for each 96-well plate and both doses in the in vitro dose screen was calculated by relating the Ahsa1-level in cells treated with Ahsa1 siRNA/ASO (normalized to GapDH) to Ahsa1 levels in mock-treated cells.

[0880] For each well, the target mRNA level was normalized to the respective GapDH mRNA level. The activity of a given siRNA/ASO was expressed as percent of mRNA concentration of the respective target (normalized to GapDH mRNA) in treated cells, relative to the target mRNA concentration (normalized to GapDH mRNA) averaged across control wells or mock transfected wells (DRCs). The half maximal inhibitory concentration (IC₅₀) was determined with XLfit software (an Excel add-in) using a 4 parameter logistic model with the formula

$$Y = bottom + ( top - bottom ) / ( 1 + {( \frac{I C 50}{X} )}^{Hillslope} )$$

and with Top constrained to a value of 100%. IC₈₀ (80% inhibitory concentration) was calculated from IC₅₀ using the formula

$$I {C}_{F} = {( \frac{F}{100 - F} )}^{\frac{1}{H}} \times I C 50 ,$$

where F is the percentage inhibition and H is the hill slope.

[0881] Table 6 shows the results of in vitro screen in cells transfected with the indicated antisense molecules.

TABLE 1
Abbreviations of nucleotide monomers used in nucleic acid sequence representation. It will be understood that these monomers,
when present in an oligonucleotide, are mutually linked by 5′-3′-phosphodiester bonds; and it is understood that when the
nucleotide contains a 2′-fluoro modification, then the fluoro replaces the hydroxy at that position in the parent nucleotide (i.e.,
it is a 2′-deoxy-2′-fluoronucleotide). It is to be further understood that the nucleotide abbreviations in the table omit the 3′-
phosphate (i.e., they are 3′-OH) when placed at the 3′-terminal position of an oligonucleotide.

| Abbreviation | Nucleotide(s) |
|---|---|
| A | Adenosine-3′-phosphate |
| Ab | beta-L-adenosine-3′-phosphate |
| Abs | beta-L-adenosine-3′-phosphorothioate |
| Af | 2′-fluoroadenosine-3′-phosphate |
| Afs | 2′-fluoroadenosine-3′-phosphorothioate |
| As | adenosine-3′-phosphorothioate |
| C | cytidine-3′-phosphate |
| Cb | beta-L-cytidine-3′-phosphate |
| Cbs | beta-L-cytidine-3′-phosphorothioate |
| Cf | 2′-fluorocytidine-3′-phosphate |
| Cfs | 2′-fluorocytidine-3′-phosphorothioate |
| Cs | cytidine-3′-phosphorothioate |
| G | guanosine-3′-phosphate |
| Gb | beta-L-guanosine-3′-phosphate |
| Gbs | beta-L-guanosine-3′-phosphorothioate |
| Gf | 2′-fluoroguanosine-3′-phosphate |
| Gfs | 2′-fluoroguanosine-3′-phosphorothioate |
| Gs | guanosine-3′-phosphorothioate |
| T | 5′-methyluridine-3′-phosphate |
| Tf | 2′-fluoro-5-methyluridine-3′-phosphate |
| Tfs | 2′-fluoro-5-methyluridine-3′-phosphorothioate |
| Ts | 5-methyluridine-3′-phosphorothioate |
| U | Uridine-3′-phosphate |
| Uf | 2′-fluorouridine-3′-phosphate |
| Ufs | 2′-fluorouridine-3′-phosphorothioate |
| Us | uridine-3′-phosphorothioate |
| N | any nucleotide, modified or unmodified |
| a | 2′-O—methyladenosine-3′-phosphate |
| as | 2′-O—methyladenosine-3′-phosphorothioate |
| C | 2′-O—methylcytidine-3′-phosphate |
| CS | 2′-O—methylcytidine-3′-phosphorothioate |
| g | 2′-O—methylguanosine-3′-phosphate |
| gs | 2′-O—methylguanosine-3′-phosphorothioate |
| t | 2′-O—methyl-5-methyluridine-3′-phosphate |
| ts | 2′-O—methyl-5-methyluridine-3′-phosphorothioate |
| u | 2′-O—methyluridine-3′-phosphate |
| us | 2′-O—methyluridine-3′-phosphorothioate |
| S | phosphorothioate linkage |
| L10 | N-(cholesterylcarboxamidocaproyl)-4-hydroxyprolinol (Hyp-C6-Chol) |
| | [chemical structure] |
| L96 | N-[tris(GalNAc-alkyl)-amidodecanoyl)]-4-hydroxyprolinol |
| | (Hyp-(GalNAc-alkyl)3) |
| | (2S,4R)-1-[29-[2-(acetylamino)-2-deoxy-β-D-galactopyranosyl]oxy]-14,14-bis[[3-[[3-[[5-[2-(acetylamino)-2- |
| | deoxy-β-D-galactopyranosyl]oxy]-1-oxopentyl]amino]propyl]amino]-3-oxopropoxy]methyl]-1,12,19,25- |
| | tetraoxo-16-oxa-13,20,24-triazanonacos-1-yl]-4-hydroxy-2-hydroxymethylpyrrolidine |
| | [chemical structure] |
| uL96 | 2′-O—methyluridine-3′-phosphate ((2S,4R)-1-[29-[[2-(acetylamino)-2-deoxy-β-D-galactopyranosyl] |
| | oxy]-14,14-bis[[3-[[3-[[5-[[2-(acetylamino)-2-deoxy-β-D-galactopyranosyl]oxy]-1-oxopentyl]amino] |
| | propyl]amino]-3-oxopropoxy]methyl]-1,12,19,25-tetraoxo-16-oxa-13,20,24-triazanonacos-1-yl]-4- |
| | hydroxy-2-pyrrolidinyl)methyl ester |
| | [chemical structure] |
| Y34 | 2-hydroxymethyl-tetrahydrofurane-4-methoxy-3-phosphate (abasic 2′-OMe furanose) |
| | [chemical structure] |
| Y44 | inverted abasic DNA (2-hydroxymethyl-tetrahydrofurane-5-phosphate) |
| | [chemical structure] |
| (Agn) | Adenosine-glycol nucleic acid (GNA) |
| (Cgn) | Cytidine-glycol nucleic acid (GNA) |
| (Ggn) | Guanosine-glycol nucleic acid (GNA) |
| (Tgn) | Thymidine-glycol nucleic acid (GNA) S-Isomer |
| P | Phosphate |
| VP | Vinyl-phosphonate |
| dA | 2′-deoxyadenosine-3′-phosphate |
| dAs | 2′-deoxyadenosine-3′-phosphorothioate |
| dC | 2′-deoxycytidine-3′-phosphate |
| dCs | 2′-deoxycytidine-3′-phosphorothioate |
| dG | 2′-deoxyguanosine-3′-phosphate |
| dGs | 2′-deoxyguanosine-3′-phosphorothioate |
| dT | 2′-deoxythimidine-3′-phosphate |
| dTs | 2′-deoxythimidine-3′-phosphorothioate |
| dU | 2′-deoxyuridine |
| dUs | 2′-deoxyuridine-3′-phosphorothioate |
| (C2p) | cytidine-2′-phosphate |
| (G2p) | guanosine-2′-phosphate |
| (U2p) | uridine-2′-phosphate |
| (A2p) | adenosine-2′-phosphate |
| (Ahd) | 2′-O—hexadecyl-adenosine-3′-phosphate |
| (Ahds) | 2′-O—hexadecyl-adenosine-3′-phosphorothioate |
| (Chd) | 2′-O—hexadecyl-cytidine-3′-phosphate |
| (Chds) | 2′-O—hexadecyl-cytidine-3′-phosphorothioate |
| (Ghd) | 2′-O—hexadecyl-guanosine-3′-phosphate |
| (Ghds) | 2′-O—hexadecyl-guanosine-3′-phosphorothioate |
| (Uhd) | 2′-O—hexadecyl-uridine-3′-phosphate |
| (Uhds) | 2′-O—hexadecyl-uridine-3′-phosphorothioate |
| (Aeo) | 2′-O—methoxyethyladenosine-3′-phosphate |
| (Aeos) | 2′-O—methoxyethyladenosine-3′-phosphorothioate |
| (Geo) | 2′-O—methoxyethylguanosine-3′-phosphate |
| (Geos) | 2′-O—methoxyethylguanosine-3′-phosphorothioate |
| (Teo) | 2′-O—methoxyethyl-5-methyluridine-3′-phosphate |
| (Teos) | 2′-O—methoxyethyl-5-methyluridine-3′-phosphorothioate |
| (m5Ceo) | 2′-O—methoxyethyl-5-methylcytidine-3′-phosphate |
| (m5Ceos) | 2′-O—methoxyethyl-5-methylcytidine-3′-phosphorothioate |
| (m5dC) | 5′-methyl-deoxycytidine-3′-phosphate |
| (m5dCs) | 5′-methyl-deoxycytidine-3′-phosphorothioate |

TABLE 2
Unmodified Sense and Antisense Strand Sequences of INHBE dsRNA Agents

| | | | Range in | | |
|---|---|---|---|---|---|
| | | SEQ | INHBE | | SEQ |
| | Sense Sequence | ID | mRNA | Antisense Sequence | ID |
| Duplex Name | 5′ to 3′ | NO: | NM_031479.5 | 5′ to 3′ | NO: |
| AD-1656008 | UAGCCAGACAUGAGCUGUGAU | | 1-23 | AUCACAGCUCAUGUCUGGCUACU | |
| AD-1656026 | GAGGGUCAAGCACAGCUAUCU | | 19-41 | AGAUAGCUGUGCUUGACCCUCAC | |
| AD-1656043 | AUCCAUCAGAUGAUCUACUUU | | 36-58 | AAAGUAGAUCAUCUGAUGGAUAG | |
| AD-1656054 | GAUCUACUUUCAGCCUUCCUU | | 47-69 | AAGGAAGGCUGAAAGUAGAUCAU | |
| AD-1656074 | GAGUCCCAGACAAUAGAAGAU | | 67-89 | AUCUUCUAUUGUCUGGGACUCAG | |
| AD-1656086 | AUAGAAGACAGGUGGCUGUAU | | 79-101 | AUACAGCCACCUGUCUUCUAUUG | |
| AD-1656097 | GUGGCUGUACCCUUGGCCAAU | | 90-112 | AUUGGCCAAGGGUACAGCCACCU | |
| AD-1656108 | CUUGGCCAAGGGUAGGUGUGU | | 101-123 | ACACACCUACCCUUGGCCAAGGG | |
| AD-1656125 | GUGGCAGUGGUGUCUGCUGUU | | 118-140 | AACAGCAGACACCACUGCCACAC | |
| AD-1656139 | UGCUGUCACUGUGCCCUCAUU | | 132-154 | AAUGAGGGCACAGUGACAGCAGA | |
| AD-1656146 | AGCAAUCAGACUCAACAGACU | | 160-182 | AGUCUGUUGAGUCUGAUUGCUGG | |
| AD-1656164 | ACGGAGCAACUGCCAUCCGAU | | 178-200 | AUCGGAUGGCAGUUGCUCCGUCU | |
| AD-1656185 | GCUCCUGAACCAGGGCCAUUU | | 199-221 | AAAUGGCCCUGGUUCAGGAGCCU | |
| AD-1656196 | AGGGCCAUUCACCAGGAGCAU | | 210-232 | AUGCUCCUGGUGAAUGGCCCUGG | |
| AD-1656220 | GCUCCCUGAUGUCCAGCUCUU | | 234-256 | AAGAGCUGGACAUCAGGGAGCCG | |
| AD-1656233 | CAGCUCUGGCUGGUGCUGCUU | | 247-269 | AAGCAGCACCAGCCAGAGCUGGA | |
| AD-1656254 | UGGGCACUGGUGCGAGCACAU | | 268-290 | AUGUGCUCGCACCAGUGCCCACA | |
| AD-1656260 | AGGGUCUGUGUGUCCCUCCUU | | 294-316 | AAGGAGGGACACACAGACCCUGU | |
| AD-1656265 | CAAGCAGAACGAGCUCUGGUU | | 337-359 | AACCAGAGCUCGUUCUGCUUGGG | |
| AD-1656280 | CUGGUGCUGGAGCUAGCCAAU | | 352-374 | AUUGGCUAGCUCCAGCACCAGAG | |
| AD-1656292 | CUAGCCAAGCAGCAAAUCCUU | | 364-386 | AAGGAUUUGCUGCUUGGCUAGCU | |
| AD-1656307 | AUCCUGGAUGGGUUGCACCUU | | 379-401 | AAGGUGCAACCCAUCCAGGAUUU | |
| AD-1656319 | UUGCACCUGACCAGUCGUCCU | | 391-413 | AGGACGACUGGUCAGGUGCAACC | |
| AD-1656333 | UCGUCCCAGAAUAACUCAUCU | | 405-427 | AGAUGAGUUAUUCUGGGACGACU | |
| AD-1656360 | CCCUCCGGAGACUACAGCCAU | | 452-474 | AUGGCUGUAGUCUCCGGAGGGCU | |
| AD-1656372 | UACAGCCAGGGAGUGUGGCUU | | 464-486 | AAGCCACACUCCCUGGCUGUAGU | |
| AD-1656383 | AGUGUGGCUCCAGGGAAUGGU | | 475-497 | ACCAUUCCCUGGAGCCACACUCC | |
| AD-1656392 | CAUCAGCUUUGCUACUGUCAU | | 504-526 | AUGACAGUAGCAAAGCUGAUGAC | |
| AD-1656406 | CUGUCACAGACUCCACUUCAU | | 518-540 | AUGAAGUGGAGUCUGUGACAGUA | |
| AD-1656417 | UCCACUUCAGCCUACAGCUCU | | 529-551 | AGAGCUGUAGGCUGAAGUGGAGU | |
| AD-1656437 | CCUGCUCACUUUUCACCUGUU | | 549-571 | AACAGGUGAAAAGUGAGCAGGGA | |
| AD-1656449 | UCACCUGUCCACUCCUCGGUU | | 561-583 | AACCGAGGAGUGGACAGGUGAAA | |
| AD-1656468 | UCCCACCACCUGUACCAUGCU | | 580-602 | AGCAUGGUACAGGUGGUGGGACC | |
| AD-1656480 | UACCAUGCCCGCCUGUGGCUU | | 592-614 | AAGCCACAGGCGGGCAUGGUACA | |
| AD-1656492 | CCCUUCCUGGCACUCUUUGCU | | 626-648 | AGCAAAGAGUGCCAGGAAGGGUG | |
| AD-1656504 | CUCUUUGCUUGAGGAUCUUCU | | 638-660 | AGAAGAUCCUCAAGCAAAGAGUG | |
| AD-1656535 | ACUCUCCUGGCUGAGCACCAU | | 694-716 | AUGGUGCUCAGCCAGGAGAGUGC | |
| AD-1656547 | GAGCACCACAUCACCAACCUU | | 706-728 | AAGGUUGGUGAUGUGGUGCUCAG | |
| AD-1656559 | ACCAACCUGGGCUGGCAUACU | | 718-740 | AGUAUGCCAGCCCAGGUUGGUGA | |
| AD-1656570 | CUGGCAUACCUUAACUCUGCU | | 729-751 | AGCAGAGUUAAGGUAUGCCAGCC | |
| AD-1656587 | UGCCCUCUAGUGGCUUGAGGU | | 746-768 | ACCUCAAGCCACUAGAGGGCAGA | |
| AD-1656591 | AGAAGUCUGGUGUCCUGAAAU | | 770-792 | AUUUCAGGACACCAGACUUCUCA | |
| AD-1656602 | GUCCUGAAACUGCAACUAGAU | | 781-803 | AUCUAGUUGCAGUUUCAGGACAC | |
| AD-1656622 | ACAGCACAGUUACUGGACAAU | | 821-843 | AUUGUCCAGUAACUGUGCUGUUG | |
| AD-1656634 | CUGGACAACCGAGGCGGCUCU | | 833-855 | AGAGCCGCCUCGGUUGUCCAGUA | |
| AD-1656647 | GCGGCUCUUGGACACAGCAGU | | 846-868 | ACUGCUGUGUCCAAGAGCCGCCU | |
| AD-1656667 | GACACCAGCAGCCCUUCCUAU | | 866-888 | AUAGGAAGGGCUGCUGGUGUCCU | |
| AD-1656679 | CCUUCCUAGAGCUUAAGAUCU | | 878-900 | AGAUCUUAAGCUCUAGGAAGGGC | |
| AD-1656690 | CUUAAGAUCCGAGCCAAUGAU | | 889-911 | AUCAUUGGCUCGGAUCUUAAGCU | |
| AD-1656701 | AGCCAAUGAGCCUGGAGCAGU | | 900-922 | ACUGCUCCAGGCUCAUUGGCUCG | |
| AD-1656716 | AGGCGAGACCAUUACGUAGAU | | 973-995 | AUCUACGUAAUGGUCUCGCCUGC | |
| AD-1656728 | UACGUAGACUUCCAGGAACUU | | 985-1007 | AAGUUCCUGGAAGUCUACGUAAU | |
| AD-1656740 | CAGGAACUGGGAUGGCGGGAU | | 997-1019 | AUCCCGCCAUCCCAGUUCCUGGA | |
| AD-1656754 | GCGGGACUGGAUACUGCAGCU | | 1011-1033 | AGCUGCAGUAUCCAGUCCCGCCA | |
| AD-1656762 | UACCAGCUGAAUUACUGCAGU | | 1039-1061 | ACUGCAGUAAUUCAGCUGGUACC | |
| AD-1656775 | ACUGCAGUGGGCAGUGCCCUU | | 1052-1074 | AAGGGCACUGCCCACUGCAGUAA | |
| AD-1656792 | CAGGCAUUGCUGCCUCUUUCU | | 1091-1113 | AGAAAGAGGCAGCAAUGCCUGGG | |
| AD-1656808 | UUUCCAUUCUGCCGUCUUCAU | | 1107-1129 | AUGAAGACGGCAGAAUGGAAAGA | |
| AD-1656820 | CGUCUUCAGCCUCCUCAAAGU | | 1119-1141 | ACUUUGAGGAGGCUGAAGACGGC | |
| AD-1656832 | CCUCAAAGCCAACAAUCCUUU | | 1131-1153 | AAAGGAUUGUUGGCUUUGAGGAG | |
| AD-1656849 | CUUGGCCUGCCAGUACCUCCU | | 1148-1170 | AGGAGGUACUGGCAGGCCAAGGA | |
| AD-1656862 | UACCUCCUGUUGUGUCCCUAU | | 1161-1183 | AUAGGGACACAACAGGAGGUACU | |
| AD-1656873 | GUGUCCCUACUGCCCGAAGGU | | 1172-1194 | ACCUUCGGGCAGUAGGGACACAA | |
| AD-1656876 | CUCUCUCUCCUCUACCUGGAU | | 1195-1217 | AUCCAGGUAGAGGAGAGAGAGGG | |
| AD-1656888 | UACCUGGAUCAUAAUGGCAAU | | 1207-1229 | AUUGCCAUUAUGAUCCAGGUAGA | |
| AD-1656900 | AAUGGCAAUGUGGUCAAGACU | | 1219-1241 | AGUCUUGACCACAUUGCCAUUAU | |
| AD-1656915 | AAGACGGAUGUGCCAGAUAUU | | 1234-1256 | AAUAUCUGGCACAUCCGUCUUGA | |
| AD-1656926 | GCCAGAUAUGGUGGUGGAGGU | | 1245-1267 | ACCUCCACCACCAUAUCUGGCAC | |
| AD-1656942 | GAGGCCUGUGGCUGCAGCUAU | | 1261-1283 | AUAGCUGCAGCCACAGGCCUCCA | |
| AD-1656954 | UGCAGCUAGCAAGAGGACCUU | | 1273-1295 | AAGGUCCUCUUGCUAGCUGCAGC | |
| AD-1656958 | CUUUGGAGUGAAGAGACCAAU | | 1297-1319 | AUUGGUCUCUUCACUCCAAAGCC | |
| AD-1656969 | AGAGACCAAGAUGAAGUUUCU | | 1308-1330 | AGAAACUUCAUCUUGGUCUCUUC | |
| AD-1656996 | CAGGGCAUCUGUGACUGGAGU | | 1335-1357 | ACUCCAGUCACAGAUGCCCUGUG | |
| AD-1657013 | GAGGCAUCAGAUUCCUGAUCU | | 1352-1374 | AGAUCAGGAAUCUGAUGCCUCCA | |
| AD-1657022 | ACCCAACAACCACCUGGCAAU | | 1381-1403 | AUUGCCAGGUGGUUGUUGGGUUG | |
| AD-1657037 | GGCAAUAUGACUCACUUGACU | | 1396-1418 | AGUCAAGUGAGUCAUAUUGCCAG | |
| AD-1657045 | GACCCAAAUGGGCACUUUCUU | | 1424-1446 | AAGAAAGUGCCCAUUUGGGUCCC | |
| AD-1657058 | ACUUUCUUGUCUGAGACUCUU | | 1437-1459 | AAGAGUCUCAGACAAGAAAGUGC | |
| AD-1657069 | UGAGACUCUGGCUUAUUCCAU | | 1448-1470 | AUGGAAUAAGCCAGAGUCUCAGA | |
| AD-1657085 | UCCAGGUUGGCUGAUGUGUUU | | 1464-1486 | AAACACAUCAGCCAACCUGGAAU | |
| AD-1657099 | UGUGUUGGGAGAUGGGUAAAU | | 1478-1500 | AUUUACCCAUCUCCCAACACAUC | |
| AD-1657113 | GGUAAAGCGUUUCUUCUAAAU | | 1492-1514 | AUUUAGAAGAAACGCUUUACCCA | |
| AD-1657119 | UACCCAGAAAGCAUGAUUUCU | | 1518-1540 | AGAAAUCAUGCUUUCUGGGUAGA | |
| AD-1657133 | GAUUUCCUGCCCUAAGUCCUU | | 1532-1554 | AAGGACUUAGGGCAGGAAAUCAU | |
| AD-1657147 | AGUCCUGUGAGAAGAUGUCAU | | 1546-1568 | AUGACAUCUUCUCACAGGACUUA | |
| AD-1657164 | UCAGGGACUAGGGAGGGAGGU | | 1563-1585 | ACCUCCCUCCCUAGUCCCUGACA | |
| AD-1657185 | AAUUACUUAGCCUCUCCCAAU | | 1600-1622 | AUUGGGAGAGGCUAAGUAAUUUU | |
| AD-1657202 | CAAGAUGAGAAAGUCCUCAAU | | 1617-1639 | AUUGAGGACUUUCUCAUCUUGGG | |
| AD-1657211 | GGAGGAAGCAGAUAGAUGGUU | | 1646-1668 | AACCAUCUAUCUGCUUCCUCCUC | |
| AD-1657234 | GCAGGCUUGAAGCAGGGUAAU | | 1669-1691 | AUUACCCUGCUUCAAGCCUGCUG | |
| AD-1657245 | GCAGGGUAAGCAGGCUGGCCU | | 1680-1702 | AGGCCAGCCUGCUUACCCUGCUU | |
| AD-1657261 | GGCCCAGGGUAAGGGCUGUUU | | 1696-1718 | AAACAGCCCUUACCCUGGGCCAG | |
| AD-1657274 | GGCUGUUGAGGUACCUUAAGU | | 1709-1731 | ACUUAAGGUACCUCAACAGCCCU | |
| AD-1657286 | ACCUUAAGGGAAGGUCAAGAU | | 1721-1743 | AUCUUGACCUUCCCUUAAGGUAC | |
| AD-1657299 | GUCAAGAGGGAGAUGGGCAAU | | 1734-1756 | AUUGCCCAUCUCCCUCUUGACCU | |
| AD-1657322 | GCUGAGGGAGGAUGCUUAGGU | | 1757-1779 | ACCUAAGCAUCCUCCCUCAGCGC | |
| AD-1657324 | AGAAACAGGAGUCAGGAAAAU | | 1785-1807 | AUUUUCCUGACUCCUGUUUCUGG | |
| AD-1657335 | UCAGGAAAAUGAGGCACUAAU | | 1796-1818 | AUUAGUGCCUCAUUUUCCUGACU | |
| AD-1657347 | GGCACUAAGCCUAAGAAGUUU | | 1808-1830 | AAACUUCUUAGGCUUAGUGCCUC | |
| AD-1657359 | AAGAAGUUCCCUGGUUUUUCU | | 1820-1842 | AGAAAAACCAGGGAACUUCUUAG | |
| AD-1657374 | CACUGGGAGACAAGCAUUUAU | | 1855-1877 | AUAAAUGCUUGUCUCCCAGUGGG | |
| AD-1657385 | AAGCAUUUAUACUUUCUUUCU | | 1866-1888 | AGAAAGAAAGUAUAAAUGCUUGU | |
| AD-1657395 | UUUUGAGAUCGAGUCUCGCUU | | 1899-1921 | AAGCGAGACUCGAUCUCAAAAAA | |
| AD-1657410 | UCUCGCUCUGUCACCAGGCUU | | 1912-1934 | AAGCCUGGUGACAGAGCGAGACU | |
| AD-1657431 | AGUGCAGUGACACGAUCUUGU | | 1934-1956 | ACAAGAUCGUGUCACUGCACUCC | |
| AD-1657446 | GCUCACUGCAACCUCCGUCUU | | 1954-1976 | AAGACGGAGGUUGCAGUGAGCCA | |
| AD-1657457 | CCUCCGUCUCCUGGGUUCAAU | | 1965-1987 | AUUGAACCCAGGAGACGGAGGUU | |
| AD-1657463 | UUCUGCCUCAGCCUCCCGAGU | | 1992-2014 | ACUCGGGAGGCUGAGGCAGAAGA | |
| AD-1657475 | UGGGUUCAAGUGAUUCUUCUU | | 1976-1998 | AAGAAGAAUCACUUGAACCCAGG | |
| AD-1657503 | GAGCAGCUGGGAUUACAGGCU | | 2009-2031 | AGCCUGUAAUCCCAGCUGCUCGG | |
| AD-1657520 | CGCCCACUAAUUUUUGUAUUU | | 2028-2050 | AAAUACAAAAAUUAGUGGGCGCC | |
| AD-1657529 | UGUAUUCUUAGUAGAAACGAU | | 2042-2064 | AUCGUUUCUACUAAGAAUACAAA | |
| AD-1657540 | UAGAAACGAGGUUUCAACAUU | | 2053-2075 | AAUGUUGAAACCUCGUUUCUACU | |
| AD-1657552 | UUCAACAUGUUGGCCAGGAUU | | 2065-2087 | AAUCCUGGCCAACAUGUUGAAAC | |
| AD-1657564 | CCAGGAUGGUCUCAAUCUCUU | | 2078-2100 | AAGAGAUUGAGACCAUCCUGGCC | |
| AD-1657575 | UCAAUCUCUUGACCUCUUGAU | | 2089-2111 | AUCAAGAGGUCAAGAGAUUGAGA | |
| AD-1657586 | ACCUCUUGAUCCACCCGACUU | | 2100-2122 | AAGUCGGGUGGAUCAAGAGGUCA | |
| AD-1657600 | CCGACUUGGCCUCCCGAAGUU | | 2114-2136 | AACUUCGGGAGGCCAAGUCGGGU | |
| AD-1657615 | GAAGUGAUGAGAUUAUAGGCU | | 2129-2151 | AGCCUAUAAUCUCAUCACUUCGG | |
| AD-1657641 | CCUGGCUUAUACUUUCUUAAU | | 2162-2184 | AUUAAGAAAGUAUAAGCCAGGCG | |
| AD-1657653 | GAGAAAGAAAAUCAACAAAUU | | 2189-2211 | AAUUUGUUGAUUUUCUUUCUCCU | |
| AD-1657674 | UGAGUCAUAAAGAAGGGUUAU | | 2210-2232 | AUAACCCUUCUUUAUGACUCACA | |
| AD-1657687 | AGGGUUAGGGUGAUGGUCCAU | | 2223-2245 | AUGGACCAUCACCCUAACCCUUC | |
| AD-1657704 | CCAGAGCAACAGUUCUUCAAU | | 2240-2262 | AUUGAAGAACUGUUGCUCUGGAC | |
| AD-1657716 | UUCUUCAAGUGUACUCUGUAU | | 2252-2274 | AUACAGAGUACACUUGAAGAACU | |
| AD-1657727 | UACUCUGUAGGCUUCUGGGAU | | 2263-2285 | AUCCCAGAAGCCUACAGAGUACA | |
| AD-1657741 | CUGGGAGGUCCCUUUUCAGGU | | 2277-2299 | ACCUGAAAAGGGACCUCCCAGAA | |
| AD-1657744 | GUCCACAAAGUCAAAGCUAUU | | 2300-2322 | AAUAGCUUUGACUUUGUGGACAC | |
| AD-1657760 | CUAACAUGUUAUUUGCCUUUU | | 2333-2355 | AAAAGGCAAAUAACAUGUUAGUA | |
| AD-1657776 | CUUUUGAAUUCUCAUUAUCUU | | 2349-2371 | AAGAUAAUGAGAAUUCAAAAGGC | |
| AD-1657793 | GUAUUGUGGAGUUUUCCAGAU | | 2376-2398 | AUCUGGAAAACUCCACAAUACAA | |
| AD-1657811 | GAGGCCGUGUGACAUGUGAUU | | 2394-2416 | AAUCACAUGUCACACGGCCUCUG | |
| AD-1657822 | ACAUGUGAUUACAUCAUCUUU | | 2405-2427 | AAAGAUGAUGUAAUCACAUGUCA | |
| AD-1657834 | AUCAUCUUUCUGACAUCAUUU | | 2417-2439 | AAAUGAUGUCAGAAAGAUGAUGU | |
| AD-1657845 | GACAUCAUUGUUAAUGGAAUU | | 2428-2450 | AAUUCCAUUAACAAUGAUGUCAG | |

TABLE 3
Modified Sense and Antisense Strand Sequences
of INHBE dsRNA Agents

| | | SEQ | Antisense | SEQ | | SEQ |
|---|---|---|---|---|---|---|
| Duplex | Sense Sequence | ID | Sequence | ID | mRNA target | ID |
| Name | 5′ to 3′ | NO: | 5′ to 3′ | NO: | sequence | NO: |
| AD-1656008 | usasgccaGfaCfAf | | asUfscacAfgCfUf | | AGTAGCCAGACATGA | |
| | UfgagcugugauL96 | | caugUfcUfggcuas | | GCTGTGAG | |
| | | | csu | | | |
| AD-1656026 | gsasggguCfaAfGf | | asGfsauaGfcUfGf | | GTGAGGGTCAAGCAC | |
| | CfacagcuaucuL96 | | ugcuUfgAfcccucs | | AGCTATCC | |
| | | | asc | | | |
| AD-1656043 | asusccauCfaGfAf | | asAfsaguAfgAfUf | | CTATCCATCAGATGA | |
| | UfgaucuacuuuL96 | | caucUfgAfuggaus | | TCTACTTT | |
| | | | asg | | | |
| AD-1656054 | gsasucuaCfuUfUf | | asAfsggaAfgGfCf | | ATGATCTACTTTCAG | |
| | CfagccuuccuuL96 | | ugaaAfgUfagaucs | | CCTTCCTG | |
| | | | asu | | | |
| AD-1656074 | gsasguccCfaGfAf | | asUfscuuCfuAfUf | | CTGAGTCCCAGACAA | |
| | CfaauagaagauL96 | | ugucUfgGfgacucs | | TAGAAGAC | |
| | | | asg | | | |
| AD-1656086 | asusagaaGfaCfAf | | asUfsacaGfcCfAf | | CAATAGAAGACAGGT | |
| | GfguggcuguauL96 | | ccugUfcUfucuaus | | GGCTGTAC | |
| | | | usg | | | |
| AD-1656097 | gsusggcuGfuAfCf | | asUfsuggCfcAfAf | | AGGTGGCTGTACCCT | |
| | CfcuuggccaauL96 | | ggguAfcAfgccacs | | TGGCCAAG | |
| | | | csu | | | |
| AD-1656108 | csusuggcCfaAfGf | | asCfsacaCfcUfAf | | CCCTTGGCCAAGGGT | |
| | GfguagguguguL96 | | cccuUfgGfccaags | | AGGTGTGG | |
| | | | gsg | | | |
| AD-1656125 | gsusggcaGfuGfGf | | asAfscagCfaGfAf | | GTGTGGCAGTGGTGT | |
| | UfgucugcuguuL96 | | caccAfcUfgccacs | | CTGCTGTC | |
| | | | asc | | | |
| AD-1656139 | usgscuguCfaCfUf | | asAfsugaGfgGfCf | | TCTGCTGTCACTGTG | |
| | GfugcccucauuL96 | | acagUfgAfcagcas | | CCCTCATT | |
| | | | gsa | | | |
| AD-1656146 | asgscaauCfaGfAf | | asGfsucuGfuUfGf | | CCAGCAATCAGACTC | |
| | CfucaacagacuL96 | | agucUfgAfuugcus | | AACAGACG | |
| | | | gsg | | | |
| AD-1656164 | ascsggagCfaAfCf | | asUfscggAfuGfGf | | AGACGGAGCAACTGC | |
| | UfgccauccgauL96 | | caguUfgCfuccgus | | CATCCGAG | |
| | | | csu | | | |
| AD-1656185 | gscsuccuGfaAfCf | | asAfsaugGfcCfCf | | AGGCTCCTGAACCAG | |
| | CfagggccauuuL96 | | ugguUfcAfggagcs | | GGCCATTC | |
| | | | csu | | | |
| AD-1656196 | asgsggccAfuUfCf | | asUfsgcuCfcUfGf | | CCAGGGCCATTCACC | |
| | AfccaggagcauL96 | | gugaAfuGfgcccus | | AGGAGCAT | |
| | | | gsg | | | |
| AD-1656220 | gscsucccUfgAfUf | | asAfsgagCfuGfGf | | CGGCTCCCTGATGTC | |
| | GfuccagcucuuL96 | | acauCfaGfggagcs | | CAGCTCTG | |
| | | | csg | | | |
| AD-1656233 | csasgcucUfgGfCf | | asAfsgcaGfcAfCf | | TCCAGCTCTGGCTGG | |
| | UfggugcugcuuL96 | | cagcCfaGfagcugs | | TGCTGCTG | |
| | | | gsa | | | |
| AD-1656254 | usgsggcaCfuGfGf | | asUfsgugCfuCfGf | | TGTGGGCACTGGTGC | |
| | UfgcgagcacauL96 | | caccAfgUfgcccas | | GAGCACAG | |
| | | | csa | | | |
| AD-1656260 | asgsggucUfgUfGf | | asAfsggaGfgGfAf | | ACAGGGTCTGTGTGT | |
| | UfgucccuccuuL96 | | cacaCfaGfacccus | | CCCTCCTG | |
| | | | gsu | | | |
| AD-1656265 | csasagcaGfaAfCf | | asAfsccaGfaGfCf | | CCCAAGCAGAACGAG | |
| | GfagcucugguuL96 | | ucguUfcUfgcuugs | | CTCTGGTG | |
| | | | gsg | | | |
| AD-1656280 | csusggugCfuGfGf | | asUfsuggCfuAfGf | | CTCTGGTGCTGGAGC | |
| | AfgcuagccaauL96 | | cuccAfgCfaccags | | TAGCCAAG | |
| | | | asg | | | |
| AD-1656292 | csusagccAfaGfCf | | asAfsggaUfuUfGf | | AGCTAGCCAAGCAGC | |
| | AfgcaaauccuuL96 | | cugcUfuGfgcuags | | AAATCCTG | |
| | | | csu | | | |
| AD-1656307 | asusccugGfaUfGf | | asAfsgguGfcAfAf | | AAATCCTGGATGGGT | |
| | GfguugcaccuuL96 | | cccaUfcCfaggaus | | TGCACCTG | |
| | | | usu | | | |
| AD-1656319 | ususgcacCfuGfAf | | asGfsgacGfaCfUf | | GGTTGCACCTGACCA | |
| | CfcagucguccuL96 | | ggucAfgGfugcaas | | GTCGTCCC | |
| | | | csc | | | |
| AD-1656333 | uscsguccCfaGfAf | | asGfsaugAfgUfUf | | AGTCGTCCCAGAATA | |
| | AfuaacucaucuL96 | | auucUfgGfgacgas | | ACTCATCC | |
| | | | csu | | | |
| AD-1656360 | cscscuccGfgAfGf | | asUfsggcUfgUfAf | | AGCCCTCCGGAGACT | |
| | AfcuacagccauL96 | | gucuCfcGfgagggs | | ACAGCCAG | |
| | | | csu | | | |
| AD-1656372 | usascagcCfaGfGf | | asAfsgccAfcAfCf | | ACTACAGCCAGGGAG | |
| | GfaguguggcuuL96 | | ucccUfgGfcuguas | | TGTGGCTC | |
| | | | gsu | | | |
| AD-1656383 | asgsugugGfcUfCf | | asCfscauUfcCfCf | | GGAGTGTGGCTCCAG | |
| | CfagggaaugguL96 | | uggaGfcCfacacus | | GGAATGGG | |
| | | | csc | | | |
| AD-1656392 | csasucagCfuUfUf | | asUfsgacAfgUfAf | | GTCATCAGCTTTGCT | |
| | GfcuacugucauL96 | | gcaaAfgCfugaugs | | ACTGTCAC | |
| | | | asc | | | |
| AD-1656406 | csusgucaCfaGfAf | | asUfsgaaGfuGfGf | | TACTGTCACAGACTC | |
| | CfuccacuucauL96 | | agucUfgUfgacags | | CACTTCAG | |
| | | | usa | | | |
| AD-1656417 | uscscacuUfcAfGf | | asGfsagcUfgUfAf | | ACTCCACTTCAGCCT | |
| | CfcuacagcucuL96 | | ggcuGfaAfguggas | | ACAGCTCC | |
| | | | gsu | | | |
| AD-1656437 | cscsugcuCfaCfUf | | asAfscagGfuGfAf | | TCCCTGCTCACTTTT | |
| | UfuucaccuguuL96 | | aaagUfgAfgcaggs | | CACCTGTC | |
| | | | gsa | | | |
| AD-1656449 | uscsaccuGfuCfCf | | asAfsccgAfgGfAf | | TTTCACCTGTCCACT | |
| | AfcuccucgguuL96 | | guggAfcAfggugas | | CCTCGGTC | |
| | | | asa | | | |
| AD-1656468 | uscsccacCfaCfCf | | asGfscauGfgUfAf | | GGTCCCACCACCTGT | |
| | UfguaccaugcuL96 | | caggUfgGfugggas | | ACCATGCC | |
| | | | csc | | | |
| AD-1656480 | usasccauGfcCfCf | | asAfsgccAfcAfGf | | TGTACCATGCCCGCC | |
| | GfccuguggcuuL96 | | gcggGfcAfugguas | | TGTGGCTG | |
| | | | csa | | | |
| AD-1656492 | cscscuucCfuGfGf | | asGfscaaAfgAfGf | | CACCCTTCCTGGCAC | |
| | CfacucuuugcuL96 | | ugccAfgGfaagggs | | TCTTTGCT | |
| | | | usg | | | |
| AD-1656504 | csuscuuuGfcUfUf | | asGfsaagAfuCfCf | | CACTCTTTGCTTGAG | |
| | GfaggaucuucuL96 | | ucaaGfcAfaagags | | GATCTTCC | |
| | | | usg | | | |
| AD-1656535 | ascsucucCfuGfGf | | asUfsgguGfcUfCf | | GCACTCTCCTGGCTG | |
| | CfugagcaccauL96 | | agccAfgGfagagus | | AGCACCAC | |
| | | | gsc | | | |
| AD-1656547 | gsasgcacCfaCfAf | | asAfsgguUfgGfUf | | CTGAGCACCACATCA | |
| | UfcaccaaccuuL96 | | gaugUfgGfugcucs | | CCAACCTG | |
| | | | asg | | | |
| AD-1656559 | ascscaacCfuGfGf | | asGfsuauGfcCfAf | | TCACCAACCTGGGCT | |
| | GfcuggcauacuL96 | | gcccAfgGfuuggus | | GGCATACC | |
| | | | gsa | | | |
| AD-1656570 | csusggcaUfaCfCf | | asGfscagAfgUfUf | | GGCTGGCATACCTTA | |
| | UfuaacucugcuL96 | | aaggUfaUfgccags | | ACTCTGCC | |
| | | | csc | | | |
| AD-1656587 | usgscccuCfuAfGf | | asCfscucAfaGfCf | | TCTGCCCTCTAGTGG | |
| | UfggcuugagguL96 | | cacuAfgAfgggcas | | CTTGAGGG | |
| | | | gsa | | | |
| AD-1656591 | asgsaaguCfuGfGf | | asUfsuucAfgGfAf | | TGAGAAGTCTGGTGT | |
| | UfguccugaaauL96 | | caccAfgAfcuucus | | CCTGAAAC | |
| | | | csa | | | |
| AD-1656602 | gsusccugAfaAfCf | | asUfscuaGfuUfGf | | GTGTCCTGAAACTGC | |
| | UfgcaacuagauL96 | | caguUfuCfaggacs | | AACTAGAC | |
| | | | asc | | | |
| AD-1656622 | ascsagcaCfaGfUf | | asUfsuguCfcAfGf | | CAACAGCACAGTTAC | |
| | UfacuggacaauL96 | | uaacUfgUfgcugus | | TGGACAAC | |
| | | | usg | | | |
| AD-1656634 | csusggacAfaCfCf | | asGfsagcCfgCfCf | | TACTGGACAACCGAG | |
| | GfaggcggcucuL96 | | ucggUfuGfuccags | | GCGGCTCT | |
| | | | usa | | | |
| AD-1656647 | gscsggcuCfuUfGf | | asCfsugcUfgUfGf | | AGGCGGCTCTTGGAC | |
| | GfacacagcaguL96 | | uccaAfgAfgccgcs | | ACAGCAGG | |
| | | | csu | | | |
| AD-1656667 | gsascaccAfgCfAf | | asUfsaggAfaGfGf | | AGGACACCAGCAGCC | |
| | GfcccuuccuauL96 | | gcugCfuGfgugucs | | CTTCCTAG | |
| | | | csu | | | |
| AD-1656679 | cscsuuccUfaGfAf | | asGfsaucUfuAfAf | | GCCCTTCCTAGAGCT | |
| | GfcuuaagaucuL96 | | gcucUfaGfgaaggs | | TAAGATCC | |
| | | | gsc | | | |
| AD-1656690 | csusuaagAfuCfCf | | asUfscauUfgGfCf | | AGCTTAAGATCCGAG | |
| | GfagccaaugauL96 | | ucggAfuCfuuaags | | CCAATGAG | |
| | | | csu | | | |
| AD-1656701 | asgsccaaUfgAfGf | | asCfsugcUfcCfAf | | CGAGCCAATGAGCCT | |
| | CfcuggagcaguL96 | | ggcuCfaUfuggcus | | GGAGCAGG | |
| | | | csg | | | |
| AD-1656716 | asgsgcgaGfaCfCf | | asUfscuaCfgUfAf | | GCAGGCGAGACCATT | |
| | AfuuacguagauL96 | | auggUfcUfcgccus | | ACGTAGAC | |
| | | | gsc | | | |
| AD-1656728 | usascguaGfaCfUf | | asAfsguuCfcUfGf | | ATTACGTAGACTTCC | |
| | UfccaggaacuuL96 | | gaagUfcUfacguas | | AGGAACTG | |
| | | | asu | | | |
| AD-1656740 | csasggaaCfuGfGf | | asUfscccGfcCfAf | | TCCAGGAACTGGGAT | |
| | GfauggcgggauL96 | | ucccAfgUfuccugs | | GGCGGGAC | |
| | | | gsa | | | |
| AD-1656754 | gscsgggaCfuGfGf | | asGfscugCfaGfUf | | TGGCGGGACTGGATA | |
| | AfuacugcagcuL96 | | auccAfgUfcccgcs | | CTGCAGCC | |
| | | | csa | | | |
| AD-1656762 | usasccagCfuGfAf | | asCfsugcAfgUfAf | | GGTACCAGCTGAATT | |
| | AfuuacugcaguL96 | | auucAfgCfugguas | | ACTGCAGT | |
| | | | csc | | | |
| AD-1656775 | ascsugcaGfuGfGf | | asAfsgggCfaCfUf | | TTACTGCAGTGGGCA | |
| | GfcagugcccuuL96 | | gcccAfcUfgcagus | | GTGCCCTC | |
| | | | asa | | | |
| AD-1656792 | csasggcaUfuGfCf | | asGfsaaaGfaGfGf | | CCCAGGCATTGCTGC | |
| | UfgccucuuucuL96 | | cagcAfaUfgccugs | | CTCTTTCC | |
| | | | gsg | | | |
| AD-1656808 | ususuccaUfuCfUf | | asUfsgaaGfaCfGf | | TCTTTCCATTCTGCC | |
| | GfccgucuucauL96 | | gcagAfaUfggaaas | | GTCTTCAG | |
| | | | gsa | | | |
| AD-1656820 | csgsucuuCfaGfCf | | asCfsuuuGfaGfGf | | GCCGTCTTCAGCCTC | |
| | CfuccucaaaguL96 | | aggcUfgAfagacgs | | CTCAAAGC | |
| | | | gsc | | | |
| AD-1656832 | cscsucaaAfgCfCf | | asAfsaggAfuUfGf | | CTCCTCAAAGCCAAC | |
| | AfacaauccuuuL96 | | uuggCfuUfugaggs | | AATCCTTG | |
| | | | asg | | | |
| AD-1656849 | csusuggcCfuGfCf | | asGfsgagGfuAfCf | | TCCTTGGCCTGCCAG | |
| | CfaguaccuccuL96 | | uggcAfgGfccaags | | TACCTCCT | |
| | | | gsa | | | |
| AD-1656862 | usasccucCfuGfUf | | asUfsaggGfaCfAf | | AGTACCTCCTGTTGT | |
| | UfgugucccuauL96 | | caacAfgGfagguas | | GTCCCTAC | |
| | | | csu | | | |
| AD-1656873 | gsusguccCfuAfCf | | asCfscuuCfgGfGf | | TTGTGTCCCTACTGC | |
| | UfgcccgaagguL96 | | caguAfgGfgacacs | | CCGAAGGC | |
| | | | asa | | | |
| AD-1656876 | csuscucuCfuCfCf | | asUfsccaGfgUfAf | | CCCTCTCTCTCCTCT | |
| | UfcuaccuggauL96 | | gaggAfgAfgagags | | ACCTGGAT | |
| | | | gsg | | | |
| AD-1656888 | usasccugGfaUfCf | | asUfsugcCfaUfUf | | TCTACCTGGATCATA | |
| | AfuaauggcaauL96 | | augaUfcCfagguas | | ATGGCAAT | |
| | | | gsa | | | |
| AD-1656900 | asasuggcAfaUfGf | | asGfsucuUfgAfCf | | ATAATGGCAATGTGG | |
| | UfggucaagacuL96 | | cacaUfuGfccauus | | TCAAGACG | |
| | | | asu | | | |
| AD-1656915 | asasgacgGfaUfGf | | asAfsuauCfuGfGf | | TCAAGACGGATGTGC | |
| | UfgccagauauuL96 | | cacaUfcCfgucuus | | CAGATATG | |
| | | | gsa | | | |
| AD-1656926 | gscscagaUfaUfGf | | asCfscucCfaCfCf | | GTGCCAGATATGGTG | |
| | GfugguggagguL96 | | accaUfaUfcuggcs | | GTGGAGGC | |
| | | | asc | | | |
| AD-1656942 | gsasggccUfgUfGf | | asUfsagcUfgCfAf | | TGGAGGCCTGTGGCT | |
| | GfcugcagcuauL96 | | gccaCfaGfgccucs | | GCAGCTAG | |
| | | | csa | | | |
| AD-1656954 | usgscagcUfaGfCf | | asAfsgguCfcUfCf | | GCTGCAGCTAGCAAG | |
| | AfagaggaccuuL96 | | uugcUfaGfcugcas | | AGGACCTG | |
| | | | gsc | | | |
| AD-1656958 | csusuuggAfgUfGf | | asUfsuggUfcUfCf | | GGCTTTGGAGTGAAG | |
| | AfagagaccaauL96 | | uucaCfuCfcaaags | | AGACCAAG | |
| | | | csc | | | |
| AD-1656969 | asgsagacCfaAfGf | | asGfsaaaCfuUfCf | | GAAGAGACCAAGATG | |
| | AfugaaguuucuL96 | | aucuUfgGfucucus | | AAGTTTCC | |
| | | | usc | | | |
| AD-1656996 | csasgggcAfuCfUf | | asCfsuccAfgUfCf | | CACAGGGCATCTGTG | |
| | GfugacuggaguL96 | | acagAfuGfcccugs | | ACTGGAGG | |
| | | | usg | | | |
| AD-1657013 | gsasggcaUfcAfGf | | asGfsaucAfgGfAf | | TGGAGGCATCAGATT | |
| | AfuuccugaucuL96 | | aucuGfaUfgccucs | | CCTGATCC | |
| | | | csa | | | |
| AD-1657022 | ascsccaaCfaAfCf | | asUfsugcCfaGfGf | | CAACCCAACAACCAC | |
| | CfaccuggcaauL96 | | ugguUfgUfugggus | | CTGGCAAT | |
| | | | usg | | | |
| AD-1657037 | gsgscaauAfuGfAf | | asGfsucaAfgUfGf | | CTGGCAATATGACTC | |
| | CfucacuugacuL96 | | agucAfuAfuugccs | | ACTTGACC | |
| | | | asg | | | |
| AD-1657045 | gsascccaAfaUfGf | | asAfsgaaAfgUfGf | | GGGACCCAAATGGGC | |
| | GfgcacuuucuuL96 | | cccaUfuUfgggucs | | ACTTTCTT | |
| | | | csc | | | |
| AD-1657058 | ascsuuucUfuGfUf | | asAfsgagUfcUfCf | | GCACTTTCTTGTCTG | |
| | CfugagacucuuL96 | | agacAfaGfaaagus | | AGACTCTG | |
| | | | gsc | | | |
| AD-1657069 | usgsagacUfcUfGf | | asUfsggaAfuAfAf | | TCTGAGACTCTGGCT | |
| | GfcuuauuccauL96 | | gccaGfaGfucucas | | TATTCCAG | |
| | | | gsa | | | |
| AD-1657085 | uscscaggUfuGfGf | | asAfsacaCfaUfCf | | ATTCCAGGTTGGCTG | |
| | CfugauguguuuL96 | | agccAfaCfcuggas | | ATGTGTTG | |
| | | | asu | | | |
| AD-1657099 | usgsuguuGfgGfAf | | asUfsuuaCfcCfAf | | GATGTGTTGGGAGAT | |
| | GfauggguaaauL96 | | ucucCfcAfacacas | | GGGTAAAG | |
| | | | usc | | | |
| AD-1657113 | gsgsuaaaGfcGfUf | | asUfsuuaGfaAfGf | | TGGGTAAAGCGTTTC | |
| | UfucuucuaaauL96 | | aaacGfcUfuuaccs | | TTCTAAAG | |
| | | | csa | | | |
| AD-1657119 | usascccaGfaAfAf | | asGfsaaaUfcAfUf | | TCTACCCAGAAAGCA | |
| | GfcaugauuucuL96 | | gcuuUfcUfggguas | | TGATTTCC | |
| | | | gsa | | | |
| AD-1657133 | gsasuuucCfuGfCf | | asAfsggaCfuUfAf | | ATGATTTCCTGCCCT | |
| | CfcuaaguccuuL96 | | gggcAfgGfaaaucs | | AAGTCCTG | |
| | | | asu | | | |
| AD-1657147 | asgsuccuGfuGfAf | | asUfsgacAfuCfUf | | TAAGTCCTGTGAGAA | |
| | GfaagaugucauL96 | | ucucAfcAfggacus | | GATGTCAG | |
| | | | usa | | | |
| AD-1657164 | uscsagggAfcUfAf | | asCfscucCfcUfCf | | TGTCAGGGACTAGGG | |
| | GfggagggagguL96 | | ccuaGfuCfccugas | | AGGGAGGG | |
| | | | csa | | | |
| AD-1657185 | asasuuacUfuAfGf | | asUfsuggGfaGfAf | | AAAATTACTTAGCCT | |
| | CfcucucccaauL96 | | ggcuAfaGfuaauus | | CTCCCAAG | |
| | | | usu | | | |
| AD-1657202 | csasagauGfaGfAf | | asUfsugaGfgAfCf | | CCCAAGATGAGAAAG | |
| | AfaguccucaauL96 | | uuucUfcAfucuugs | | TCCTCAAG | |
| | | | gsg | | | |
| AD-1657211 | gsgsaggaAfgCfAf | | asAfsccaUfcUfAf | | GAGGAGGAAGCAGAT | |
| | GfauagaugguuL96 | | ucugCfuUfccuccs | | AGATGGTC | |
| | | | usc | | | |
| AD-1657234 | gscsaggcUfuGfAf | | asUfsuacCfcUfGf | | CAGCAGGCTTGAAGC | |
| | AfgcaggguaauL96 | | cuucAfaGfccugcs | | AGGGTAAG | |
| | | | usg | | | |
| AD-1657245 | gscsagggUfaAfGf | | asGfsgccAfgCfCf | | AAGCAGGGTAAGCAG | |
| | CfaggcuggccuL96 | | ugcuUfaCfccugcs | | GCTGGCCC | |
| | | | usu | | | |
| AD-1657261 | gsgscccaGfgGfUf | | asAfsacaGfcCfCf | | CTGGCCCAGGGTAAG | |
| | AfagggcuguuuL96 | | uuacCfcUfgggccs | | GGCTGTTG | |
| | | | asg | | | |
| AD-1657274 | gsgscuguUfgAfGf | | asCfsuuaAfgGfUf | | AGGGCTGTTGAGGTA | |
| | GfuaccuuaaguL96 | | accuCfaAfcagccs | | CCTTAAGG | |
| | | | csu | | | |
| AD-1657286 | ascscuuaAfgGfGf | | asUfscuuGfaCfCf | | GTACCTTAAGGGAAG | |
| | AfaggucaagauL96 | | uuccCfuUfaaggus | | GTCAAGAG | |
| | | | asc | | | |
| AD-1657299 | gsuscaagAfgGfGf | | asUfsugcCfcAfUf | | AGGTCAAGAGGGAGA | |
| | AfgaugggcaauL96 | | cuccCfuCfuugacs | | TGGGCAAG | |
| | | | csu | | | |
| AD-1657322 | gscsugagGfgAfGf | | asCfscuaAfgCfAf | | GCGCTGAGGGAGGAT | |
| | GfaugcuuagguL96 | | uccuCfcCfucagcs | | GCTTAGGG | |
| | | | gsc | | | |
| AD-1657324 | asgsaaacAfgGfAf | | asUfsuuuCfcUfGf | | CCAGAAACAGGAGTC | |
| | GfucaggaaaauL96 | | acucCfuGfuuucus | | AGGAAAAT | |
| | | | gsg | | | |
| AD-1657335 | uscsaggaAfaAfUf | | asUfsuagUfgCfCf | | AGTCAGGAAAATGAG | |
| | GfaggcacuaauL96 | | ucauUfuUfccugas | | GCACTAAG | |
| | | | csu | | | |
| AD-1657347 | gsgscacuAfaGfCf | | asAfsacuUfcUfUf | | GAGGCACTAAGCCTA | |
| | CfuaagaaguuuL96 | | aggcUfuAfgugccs | | AGAAGTTC | |
| | | | usc | | | |
| AD-1657359 | asasgaagUfuCfCf | | asGfsaaaAfaCfCf | | CTAAGAAGTTCCCTG | |
| | CfugguuuuucuL96 | | agggAfaCfuucuus | | GTTTTTCC | |
| | | | asg | | | |
| AD-1657374 | csascuggGfaGfAf | | asUfsaaaUfgCfUf | | CCCACTGGGAGACAA | |
| | CfaagcauuuauL96 | | ugucUfcCfcagugs | | GCATTTAT | |
| | | | gsg | | | |
| AD-1657385 | asasgcauUfuAfUf | | asGfsaaaGfaAfAf | | ACAAGCATTTATACT | |
| | AfcuuucuuucuL96 | | guauAfaAfugcuus | | TTCTTTCT | |
| | | | gsu | | | |
| AD-1657395 | ususuugaGfaUfCf | | asAfsgcgAfgAfCf | | TTTTTTGAGATCGAG | |
| | GfagucucgcuuL96 | | ucgaUfcUfcaaaas | | TCTCGCTC | |
| | | | asa | | | |
| AD-1657410 | uscsucgcUfcUfGf | | asAfsgccUfgGfUf | | AGTCTCGCTCTGTCA | |
| | UfcaccaggcuuL96 | | gacaGfaGfcgagas | | CCAGGCTG | |
| | | | csu | | | |
| AD-1657431 | asgsugcaGfuGfAf | | asCfsaagAfuCfGf | | GGAGTGCAGTGACAC | |
| | CfacgaucuuguL96 | | ugucAfcUfgcacus | | GATCTTGG | |
| | | | csc | | | |
| AD-1657446 | gscsucacUfgCfAf | | asAfsgacGfgAfGf | | TGGCTCACTGCAACC | |
| | AfccuccgucuuL96 | | guugCfaGfugagcs | | TCCGTCTC | |
| | | | csa | | | |
| AD-1657457 | cscsuccgUfcUfCf | | asUfsugaAfcCfCf | | AACCTCCGTCTCCTG | |
| | CfuggguucaauL96 | | aggaGfaCfggaggs | | GGTTCAAG | |
| | | | usu | | | |
| AD-1657463 | ususcugcCfuCfAf | | asCfsucgGfgAfGf | | TCTTCTGCCTCAGCC | |
| | GfccucccgaguL96 | | gcugAfgGfcagaas | | TCCCGAGC | |
| | | | gsa | | | |
| AD-1657475 | usgsgguuCfaAfGf | | asAfsgaaGfaAfUf | | CCTGGGTTCAAGTGA | |
| | UfgauucuucuuL96 | | cacuUfgAfacccas | | TTCTTCTG | |
| | | | gsg | | | |
| AD-1657503 | gsasgcagCfuGfGf | | asGfsccuGfuAfAf | | CCGAGCAGCTGGGAT | |
| | GfauuacaggcuL96 | | ucccAfgCfugcucs | | TACAGGCG | |
| | | | gsg | | | |
| AD-1657520 | csgscccaCfuAfAf | | asAfsauaCfaAfAf | | GGCGCCCACTAATTT | |
| | UfuuuuguauuuL96 | | aauuAfgUfgggcgs | | TTGTATTC | |
| | | | csc | | | |
| AD-1657529 | usgsuauuCfuUfAf | | asUfscguUfuCfUf | | TTTGTATTCTTAGTA | |
| | GfuagaaacgauL96 | | acuaAfgAfauacas | | GAAACGAG | |
| | | | asa | | | |
| AD-1657540 | usasgaaaCfgAfGf | | asAfsuguUfgAfAf | | AGTAGAAACGAGGTT | |
| | GfuuucaacauuL96 | | accuCfgUfuucuas | | TCAACATG | |
| | | | csu | | | |
| AD-1657552 | ususcaacAfuGfUf | | asAfsuccUfgGfCf | | GTTTCAACATGTTGG | |
| | UfggccaggauuL96 | | caacAfuGfuugaas | | CCAGGATG | |
| | | | asc | | | |
| AD-1657564 | cscsaggaUfgGfUf | | asAfsgagAfuUfGf | | GGCCAGGATGGTCTC | |
| | CfucaaucucuuL96 | | agacCfaUfccuggs | | AATCTCTT | |
| | | | csc | | | |
| AD-1657575 | uscsaaucUfcUfUf | | asUfscaaGfaGfGf | | TCTCAATCTCTTGAC | |
| | GfaccucuugauL96 | | ucaaGfaGfauugas | | CTCTTGAT | |
| | | | gsa | | | |
| AD-1657586 | ascscucuUfgAfUf | | asAfsgucGfgGfUf | | TGACCTCTTGATCCA | |
| | CfcacccgacuuL96 | | ggauCfaAfgaggus | | CCCGACTT | |
| | | | csa | | | |
| AD-1657600 | cscsgacuUfgGfCf | | asAfscuuCfgGfGf | | ACCCGACTTGGCCTC | |
| | CfucccgaaguuL96 | | aggcCfaAfgucggs | | CCGAAGTG | |
| | | | gsu | | | |
| AD-1657615 | gsasagugAfuGfAf | | asGfsccuAfuAfAf | | CCGAAGTGATGAGAT | |
| | GfauuauaggcuL96 | | ucucAfuCfacuucs | | TATAGGCG | |
| | | | gsg | | | |
| AD-1657641 | cscsuggcUfuAfUf | | asUfsuaaGfaAfAf | | CGCCTGGCTTATACT | |
| | AfcuuucuuaauL96 | | guauAfaGfccaggs | | TTCTTAAT | |
| | | | csg | | | |
| AD-1657653 | gsasgaaaGfaAfAf | | asAfsuuuGfuUfGf | | AGGAGAAAGAAAATC | |
| | AfucaacaaauuL96 | | auuuUfcUfuucucs | | AACAAATG | |
| | | | csu | | | |
| AD-1657674 | usgsagucAfuAfAf | | asUfsaacCfcUfUf | | TGTGAGTCATAAAGA | |
| | AfgaaggguuauL96 | | cuuuAfuGfacucas | | AGGGTTAG | |
| | | | csa | | | |
| AD-1657687 | asgsgguuAfgGfGf | | asUfsggaCfcAfUf | | GAAGGGTTAGGGTGA | |
| | UfgaugguccauL96 | | caccCfuAfacccus | | TGGTCCAG | |
| | | | usc | | | |
| AD-1657704 | cscsagagCfaAfCf | | asUfsugaAfgAfAf | | GTCCAGAGCAACAGT | |
| | AfguucuucaauL96 | | cuguUfgCfucuggs | | TCTTCAAG | |
| | | | asc | | | |
| AD-1657716 | ususcuucAfaGfUf | | asUfsacaGfaGfUf | | AGTTCTTCAAGTGTA | |
| | GfuacucuguauL96 | | acacUfuGfaagaas | | CTCTGTAG | |
| | | | csu | | | |
| AD-1657727 | usascucuGfuAfGf | | asUfscccAfgAfAf | | TGTACTCTGTAGGCT | |
| | GfcuucugggauL96 | | gccuAfcAfgaguas | | TCTGGGAG | |
| | | | csa | | | |
| AD-1657741 | csusgggaGfgUfCf | | asCfscugAfaAfAf | | TTCTGGGAGGTCCCT | |
| | CfcuuuucagguL96 | | gggaCfcUfcccags | | TTTCAGGG | |
| | | | asa | | | |
| AD-1657744 | gsusccacAfaAfGf | | asAfsuagCfuUfUf | | GTGTCCACAAAGTCA | |
| | UfcaaagcuauuL96 | | gacuUfuGfuggacs | | AAGCTATT | |
| | | | asc | | | |
| AD-1657760 | csusaacaUfgUfUf | | asAfsaagGfcAfAf | | TACTAACATGTTATT | |
| | AfuuugccuuuuL96 | | auaaCfaUfguuags | | TGCCTTTT | |
| | | | usa | | | |
| AD-1657776 | csusuuugAfaUfUf | | asAfsgauAfaUfGf | | GCCTTTTGAATTCTC | |
| | CfucauuaucuuL96 | | agaaUfuCfaaaags | | ATTATCTT | |
| | | | gsc | | | |
| AD-1657793 | gsusauugUfgGfAf | | asUfscugGfaAfAf | | TTGTATTGTGGAGTT | |
| | GfuuuuccagauL96 | | acucCfaCfaauacs | | TTCCAGAG | |
| | | | asa | | | |
| AD-1657811 | gsasggccGfuGfUf | | asAfsucaCfaUfGf | | CAGAGGCCGTGTGAC | |
| | GfacaugugauuL96 | | ucacAfcGfgccucs | | ATGTGATT | |
| | | | usg | | | |
| AD-1657822 | ascsauguGfaUfUf | | asAfsagaUfgAfUf | | TGACATGTGATTACA | |
| | AfcaucaucuuuL96 | | guaaUfcAfcaugus | | TCATCTTT | |
| | | | csa | | | |
| AD-1657834 | asuscaucUfuUfCf | | asAfsaugAfuGfUf | | ACATCATCTTTCTGA | |
| | UfgacaucauuuL96 | | cagaAfaGfaugaus | | CATCATTG | |
| | | | gsu | | | |
| AD-1657845 | gsascaucAfuUfGf | | asAfsuucCfaUfUf | | CTGACATCATTGTTA | |
| | UfuaauggaauuL96 | | aacaAfuGfaugucs | | ATGGAATG | |
| | | | asg | | | |

TABLE 4
Unmodified Oligonucleotide Sequences of INHBE Antisense Polynucleotide Agents

| | | | | | Start | End |
|---|---|---|---|---|---|---|
| | Unmodified | SEQ | | SEQ | Position | Position |
| Oligonucleotide | Antisense | ID | Target Sequence | ID | in NM_ | in NM_ |
| Name | Sequence 5′ to 3′ | NO: | 5′ to 3′ | NO: | 031479.5 | 031479.5 |
| ENST00000266646_1576 | TGCCTTCCCTCCCTCCCTC | | GGAGGGAGGGAGGGAAGG | | 1576 | 1595 |
| | C | | CA | | | |
| ENST00000266646_1255 | GCCACAGGCCTCCACCAC | | UGGUGGUGGAGGCCUGUG | | 1255 | 1274 |
| | CA | | GC | | | |
| ENST00000266646_466 | AGCCACACTCCCTGGCTG | | UACAGCCAGGGAGUGUGG | | 466 | 485 |
| | TA | | CU | | | |
| ENST00000266646_827 | TCGGTTGTCCAGTAACTG | | CACAGUUACUGGACAACC | | 827 | 846 |
| | TG | | GA | | | |
| ENST00000266646_1626 | CCCTCACTTGAGGACTTT | | AGAAAGUCCUCAAGUGAG | | 1626 | 1645 |
| | CT | | GG | | | |
| ENST00000266646_1000 | GTCCCGCCATCCCAGTTC | | AGGAACUGGGAUGGCGGG | | 1000 | 1019 |
| | CT | | AC | | | |
| ENST00000266646_1482 | GCTTTACCCATCTCCCAA | | UGUUGGGAGAUGGGUAAA | | 1482 | 1501 |
| | CA | | GC | | | |
| ENST00000266646_1648 | ACCATCTATCTGCTTCCT | | GGAGGAAGCAGAUAGAUG | | 1648 | 1667 |
| | CC | | GU | | | |
| ENST00000266646_1442 | GCCAGAGTCTCAGACAA | | UUCUUGUCUGAGACUCUG | | 1442 | 1461 |
| | GAA | | GC | | | |
| ENST00000266646_5 | CCTCACAGCTCATGTCTG | | GCCAGACAUGAGCUGUGA | | 5 | 24 |
| | GC | | GG | | | |
| ENST00000266646_1736 | TTGCCCATCTCCCTCTTG | | GUCAAGAGGGAGAUGGGC | | 1736 | 1755 |
| | AC | | AA | | | |
| ENST00000266646_1123 | GGCTTTGAGGAGGCTGAA | | UCUUCAGCCUCCUCAAAG | | 1123 | 1142 |
| | GA | | CC | | | |
| ENST00000266646_2390 | TGTCACACGGCCTCTGGA | | UUUCCAGAGGCCGUGUGA | | 2390 | 2409 |
| | AA | | CA | | | |
| ENST00000266646_269 | GTGCTCGCACCAGTGCCC | | GUGGGCACUGGUGCGAGC | | 269 | 288 |
| | AC | | AC | | | |
| ENST00000266646_293 | AGGGACACACAGACCCT | | GACAGGGUCUGUGUGUCC | | 293 | 312 |
| | GTC | | CU | | | |
| ENST00000266646_852 | TGTCCTGCTGTGTCCAAG | | CUCUUGGACACAGCAGGA | | 852 | 871 |
| | AG | | CA | | | |
| ENST00000266646_1906 | GACAGAGCGAGACTCGA | | AGAUCGAGUCUCGCUCUG | | 1906 | 1925 |
| | TCT | | UC | | | |
| ENST00000266646_773 | GTTTCAGGACACCAGACT | | GAAGUCUGGUGUCCUGAA | | 773 | 792 |
| | TC | | AC | | | |
| ENST00000266646_1606 | CATCTTGGGAGAGGCTAA | | ACUUAGCCUCUCCCAAGA | | 1606 | 1625 |
| | GT | | UG | | | |
| ENST00000266646_2235 | ACTGTTGCTCTGGACCAT | | UGAUGGUCCAGAGCAACA | | 2235 | 2254 |
| | CA | | GU | | | |
| ENST00000266646_1054 | AGGGCACTGCCCACTGCA | | ACUGCAGUGGGCAGUGCC | | 1054 | 1073 |
| | GT | | CU | | | |
| ENST00000266646_385 | GGTCAGGTGCAACCCATC | | UGGAUGGGUUGCACCUGA | | 385 | 404 |
| | CA | | CC | | | |
| ENST00000266646_1361 | GGGTGTGGATCAGGAATC | | CAGAUUCCUGAUCCACAC | | 1361 | 1380 |
| | TG | | CC | | | |
| ENST00000266646_1547 | GACATCTTCTCACAGGAC | | AAGUCCUGUGAGAAGAUG | | 1547 | 1566 |
| | TT | | UC | | | |
| ENST00000266646_905 | GGCCTGCTCCAGGCTCAT | | CAAUGAGCCUGGAGCAGG | | 905 | 924 |
| | TG | | CC | | | |
| ENST00000266646_522 | GCTGAAGTGGAGTCTGTG | | GUCACAGACUCCACUUCA | | 522 | 541 |
| | AC | | GC | | | |
| ENST00000266646_2270 | GGACCTCCCAGAAGCCTA | | UGUAGGCUUCUGGGAGGU | | 2270 | 2289 |
| | CA | | CC | | | |
| ENST00000266646_559 | AGGAGTGGACAGGTGAA | | CUUUUCACCUGUCCACUCC | | 559 | 578 |
| | AAG | | U | | | |
| ENST00000266646_790 | TCTGCAGTCTAGTTGCAG | | AACUGCAACUAGACUGCA | | 790 | 809 |
| | TT | | GA | | | |
| ENST00000266646_96 | ACCCTTGGCCAAGGGTAC | | CUGUACCCUUGGCCAAGG | | 96 | 115 |
| | AG | | GU | | | |
| ENST00000266646_2298 | CTTTGACTTTGTGGACAC | | GGGUGUCCACAAAGUCAA | | 2298 | 2317 |
| | CC | | AG | | | |
| ENST00000266646_1221 | GTCTTGACCACATTGCCA | | AAUGGCAAUGUGGUCAAG | | 1221 | 1240 |
| | TT | | AC | | | |
| ENST00000266646_172 | CAGTTGCTCCGTCTGTTG | | CUCAACAGACGGAGCAAC | | 172 | 191 |
| | AG | | UG | | | |
| ENST00000266646_1422 | AGTGCCCATTTGGGTCCC | | AUGGGACCCAAAUGGGCA | | 1422 | 1441 |
| | AT | | CU | | | |
| ENST00000266646_2057 | ACATGTTGAAACCTCGTT | | GAAACGAGGUUUCAACAU | | 2057 | 2076 |
| | TC | | GU | | | |
| ENST00000266646_1149 | GAGGTACTGGCAGGCCA | | CCUUGGCCUGCCAGUACC | | 1149 | 1168 |
| | AGG | | UC | | | |
| ENST00000266646_352 | GGCTAGCTCCAGCACCAG | | CUCUGGUGCUGGAGCUAG | | 352 | 371 |
| | AG | | CC | | | |
| ENST00000266646_75 | CACCTGTCTTCTATTGTCT | | CAGACAAUAGAAGACAGG | | 75 | 94 |
| | G | | UG | | | |
| ENST00000266646_2252 | CAGAGTACACTTGAAGA | | AGUUCUUCAAGUGUACUC | | 2252 | 2271 |
| | ACT | | UG | | | |
| ENST00000266646_1853 | TGCTTGTCTCCCAGTGGG | | GACCCACUGGGAGACAAG | | 1853 | 1872 |
| | TC | | CA | | | |
| ENST00000266646_585 | CGGGCATGGTACAGGTG | | CACCACCUGUACCAUGCCC | | 585 | 604 |
| | GTG | | G | | | |
| ENST00000266646_1323 | GCCCTGTGCCTGGGAAAC | | AAGUUUCCCAGGCACAGG | | 1323 | 1342 |
| | TT | | GC | | | |
| ENST00000266646_204 | GTGAATGGCCCTGGTTCA | | CCUGAACCAGGGCCAUUC | | 204 | 223 |
| | GG | | AC | | | |
| ENST00000266646_1719 | GACCTTCCCTTAAGGTAC | | AGGUACCUUAAGGGAAGG | | 1719 | 1738 |
| | CT | | UC | | | |
| ENST00000266646_239 | GCCAGAGCTGGACATCA | | CCCUGAUGUCCAGCUCUG | | 239 | 258 |
| | GGG | | GC | | | |
| ENST00000266646_1384 | ATTGCCAGGTGGTTGTTG | | CCCAACAACCACCUGGCAA | | 1384 | 1403 |
| | GG | | U | | | |
| ENST00000266646_1017 | TCGGGCTGCAGTATCCAG | | GACUGGAUACUGCAGCCC | | 1017 | 1036 |
| | TC | | GA | | | |
| ENST00000266646_113 | ACACCACTGCCACACCTA | | GGUAGGUGUGGCAGUGGU | | 113 | 132 |
| | CC | | GU | | | |
| ENST00000266646_1753 | CATCCTCCCTCAGCGCCT | | CAAGGCGCUGAGGGAGGA | | 1753 | 1772 |
| | TG | | UG | | | |
| ENST00000266646_2197 | ACTCACATTTGTTGATTTT | | GAAAAUCAACAAAUGUGA | | 2197 | 2216 |
| | C | | GU | | | |
| ENST00000266646_2441 | TACAAGCACACATTCCAT | | UAAUGGAAUGUGUGCUUG | | 2441 | 2460 |
| | TA | | UA | | | |
| ENST00000266646_1297 | GGTCTCTTCACTCCAAAG | | GGCUUUGGAGUGAAGAGA | | 1297 | 1316 |
| | CC | | CC | | | |
| ENST00000266646_1272 | TCCTCTTGCTAGCTGCAG | | GGCUGCAGCUAGCAAGAG | | 1272 | 1291 |
| | CC | | GA | | | |
| ENST00000266646_1694 | GCCCTTACCCTGGGCCAG | | GGCUGGCCCAGGGUAAGG | | 1694 | 1713 |
| | CC | | GC | | | |
| ENST00000266646_1786 | TTTCCTGACTCCTGTTTCT | | CAGAAACAGGAGUCAGGA | | 1786 | 1805 |
| | G | | AA | | | |
| ENST00000266646_684 | AGGAGAGTGCGGGACCC | | CAAGGGUCCCGCACUCUCC | | 684 | 703 |
| | TTG | | U | | | |
| ENST00000266646_1674 | TGCTTACCCTGCTTCAAG | | GGCUUGAAGCAGGGUAAG | | 1674 | 1693 |
| | CC | | CA | | | |
| ENST00000266646_646 | CCATCGGAAGATCCTCAA | | GCUUGAGGAUCUUCCGAU | | 646 | 665 |
| | GC | | GG | | | |
| ENST00000266646_712 | GCCCAGGTTGGTGATGTG | | ACCACAUCACCAACCUGG | | 712 | 731 |
| | GT | | GC | | | |
| ENST00000266646_2351 | AGATAATGAGAATTCAA | | CUUUUGAAUUCUCAUUAU | | 2351 | 2370 |
| | AAG | | CU | | | |
| ENST00000266646_2373 | AAAACTCCACAATACAAT | | AAAUUGUAUUGUGGAGUU | | 2373 | 2392 |
| | TT | | UU | | | |
| ENST00000266646_1197 | TCCAGGTAGAGGAGAGA | | CUCUCUCUCCUCUACCUGG | | 1197 | 1216 |
| | GAG | | A | | | |
| ENST00000266646_1175 | GCCTTCGGGCAGTAGGGA | | UGUCCCUACUGCCCGAAG | | 1175 | 1194 |
| | CA | | GC | | | |
| ENST00000266646_1340 | TGCCTCCAGTCACAGATG | | GGCAUCUGUGACUGGAGG | | 1340 | 1359 |
| | CC | | CA | | | |
| ENST00000266646_44 | GGCTGAAAGTAGATCATC | | CAGAUGAUCUACUUUCAG | | 44 | 63 |
| | TG | | CC | | | |
| ENST00000266646_1463 | ACATCAGCCAACCTGGAA | | UAUUCCAGGUUGGCUGAU | | 1463 | 1482 |
| | TA | | GU | | | |
| ENST00000266646_444 | CTCCGGAGGGCTCTGGTC | | CUGACCAGAGCCCUCCGG | | 444 | 463 |
| | AG | | AG | | | |
| ENST00000266646_1103 | CGGCAGAATGGAAAGAG | | UGCCUCUUUCCAUUCUGC | | 1103 | 1122 |
| | GCA | | CG | | | |
| ENST00000266646_2124 | ATCTCATCACTTCGGGAG | | GCCUCCCGAAGUGAUGAG | | 2124 | 2143 |
| | GC | | AU | | | |
| ENST00000266646_2096 | GTGGATCAAGAGGTCAA | | CUCUUGACCUCUUGAUCC | | 2096 | 2115 |
| | GAG | | AC | | | |
| ENST00000266646_665 | GGCGCCTCCTCCTTGGTC | | GGGACCAAGGAGGAGGCG | | 665 | 684 |
| | CC | | CC | | | |
| ENST00000266646_2333 | AGGCAAATAACATGTTAG | | UACUAACAUGUUAUUUGC | | 2333 | 2352 |
| | TA | | CU | | | |
| ENST00000266646_976 | GTCTACGTAATGGTCTCG | | GGCGAGACCAUUACGUAG | | 976 | 995 |
| | CC | | AC | | | |
| ENST00000266646_942 | GTCGCAGGCTCACAGGTG | | CCCACCUGUGAGCCUGCG | | 942 | 961 |
| | GG | | AC | | | |
| ENST00000266646_733 | GGGCAGAGTTAAGGTAT | | GGCAUACCUUAACUCUGC | | 733 | 752 |
| | GCC | | CC | | | |
| ENST00000266646_1817 | ACCAGGGAACTTCTTAGG | | AGCCUAAGAAGUUCCCUG | | 1817 | 1836 |
| | CT | | GU | | | |
| ENST00000266646_2161 | AGAAAGTATAAGCCAGG | | GCGCCUGGCUUAUACUUU | | 2161 | 2180 |
| | CGC | | CU | | | |
| ENST00000266646_496 | AAAGCTGATGACCTCCTC | | GGGAGGAGGUCAUCAGCU | | 496 | 515 |
| | CC | | UU | | | |
| ENST00000266646_604 | GAGCACGTGCAGCCACA | | GCCUGUGGCUGCACGUGC | | 604 | 623 |
| | GGC | | UC | | | |
| ENST00000266646_1872 | AGAAGAAAGAAAGTATA | | AUUUAUACUUUCUUUCUU | | 1872 | 1891 |
| | AAT | | CU | | | |
| ENST00000266646_1526 | GGGCAGGAAATCATGCTT | | GAAAGCAUGAUUUCCUGC | | 1526 | 1545 |
| | TC | | CC | | | |
| ENST00000266646_2217 | CACCCTAACCCTTCTTTA | | CAUAAAGAAGGGUUAGGG | | 2217 | 2236 |
| | TG | | UG | | | |
| ENST00000266646_1238 | CCATATCTGGCACATCCG | | GACGGAUGUGCCAGAUAU | | 1238 | 1257 |
| | TC | | GG | | | |
| ENST00000266646_922 | GGTCCTCCTCCTGGCCCG | | GCCGGGCCAGGAGGAGGA | | 922 | 941 |
| | GC | | CC | | | |
| ENST00000266646_1079 | TGCCTGGGCTGCCAGCCA | | CCUGGCUGGCAGCCCAGG | | 1079 | 1098 |
| | GG | | CA | | | |
| ENST00000266646_23 | TGGATAGCTGTGCTTGAC | | GGGUCAAGCACAGCUAUC | | 23 | 42 |
| | CC | | CA | | | |
| ENST00000266646_2022 | AATTAGTGGGCGCCTGTA | | AUUACAGGCGCCCACUAA | | 2022 | 2041 |
| | AT | | UU | | | |
| ENST00000266646_874 | AAGCTCTAGGAAGGGCT | | AGCAGCCCUUCCUAGAGC | | 874 | 893 |
| | GCT | | UU | | | |
| ENST00000266646_2414 | TGTCAGAAAGATGATGTA | | AUUACAUCAUCUUUCUGA | | 2414 | 2433 |
| | AT | | CA | | | |
| ENST00000266646_626 | AAAGAGTGCCAGGAAGG | | CACCCUUCCUGGCACUCUU | | 626 | 645 |
| | GTG | | U | | | |

TABLE 5
Modified Oligonucleotide Sequences of INHBE Antisense Polynucleotide Agents

| | | Antisense | |
|---|---|---|---|
| | | Oligonucleotide | SEQ |
| | | Name - Alnylam | ID |
| Oligonucleotide Name | Modified Oligonucleotide Sequences 5′ to 3′ | Designation | NO: |
| ENST00000266646_1576 | (Teos)(Geos)(m5Ceos)(m5Ceos)(Teos)dTs(m5dCs)(m5dCs)(m5dCs)dTs(m5dCs) | A-3176625.1 | |
| | (m5dCs)(m5dCs)dTs(m5dCs)(m5Ceos)(m5Ceos)(Teos)(m5Ceos)(m5Ceo) | | |
| ENST00000266646_1255 | (Geos)(m5Ceos)(m5Ceos)(Aeos)(m5Ceos)dAsdGsdGs(m5dCs)(m5dCs)dTs(m5dCs) | A-3176626.1 | |
| | (m5dCs)dAs(m5dCs)(m5Ceos)(Aeos)(m5Ceos)(m5Ceos)(Aeo) | | |
| ENST00000266646_466 | (Aeos)(Geos)(m5Ceos)(m5Ceos)(Aeos)(m5dCs)dAs(m5dCs)dTs(m5dCs)(m5dCs) | A-3176627.1 | |
| | (m5dCs)dTsdGsdGs(m5Ceos)(Teos)(Geos)(Teos)(Aeo) | | |
| ENST00000266646_827 | (Teos)(m5Ceos)(Geos)(Geos)(Teos)dTsdGsdTs(m5dCs)(m5dCs)dAsdGsdTsdAsdAs | A-3176628.1 | |
| | (m5Ceos)(Teos)(Geos)(Teos)(Geo) | | |
| ENST00000266646_1626 | (m5Ceos)(m5Ceos)(m5Ceos)(Teos)(m5Ceos)dAs(m5dCs)dTsdTsdGsdAsdGsdGsdAs | A-3176629.1 | |
| | (m5dCs)(Teos)(Teos)(Teos)(m5Ceos)(Teo) | | |
| ENST00000266646_1000 | (Geos)(Teos)(m5Ceos)(m5Ceos)(m5Ceos)dGs(m5dCs)(m5dCs)dAsdTs(m5dCs) | A-3176630.1 | |
| | (m5dCs)(m5dCs)dAsdGs(Teos)(Teos)(m5Ceos)(m5Ceos)(Teo) | | |
| ENST00000266646_1482 | (Geos)(m5Ceos)(Teos)(Teos)(Teos)dAs(m5dCs)(m5dCs)(m5dCs)dAsdTs(m5dCs)dTs | A-3176631.1 | |
| | (m5dCs)(m5dCs)(m5Ceos)(Aeos)(Aeos)(m5Ceos)(Aeo) | | |
| ENST00000266646_1648 | (Aeos)(m5Ceos)(m5Ceos)(Aeos)(Teos)(m5dCs)dTsdAsdTs(m5dCs)dTsdGs(m5dCs) | A-3176632.1 | |
| | dTsdTs(m5Ceos)(m5Ceos)(Teos)(m5Ceos)(m5Ceo) | | |
| ENST00000266646_1442 | (Geos)(m5Ceos)(m5Ceos)(Aeos)(Geos)dAsdGsdTs(m5dCs)dTs(m5dCs)dAsdGsdAs | A-3176633.1 | |
| | (m5dCs)(Aeos)(Aeos)(Geos)(Aeos)(Aeo) | | |
| ENST00000266646_5 | (m5Ceos)(m5Ceos)(Teos)(m5Ceos)(Aeos)(m5dCs)dAsdGs(m5dCs)dTs(m5dCs) | A-3176634.1 | |
| | dAsdTsdGsdTs(m5Ceos)(Teos)(Geos)(Geos)(m5Ceo) | | |
| ENST00000266646_1736 | (Teos)(Teos)(Geos)(m5Ceos)(m5Ceos)(m5dCs)dAsdTs(m5dCs)dTs(m5dCs)(m5dCs) | A-3176635.1 | |
| | (m5dCs)dTs(m5dCs)(Teos)(Teos)(Geos)(Aeos)(m5Ceo) | | |
| ENST00000266646_1123 | (Geos)(Geos)(m5Ceos)(Teos)(Teos)dTsdGsdAsdGsdGsdAsdGsdGs(m5dCs)dTs | A-3176636.1 | |
| | (Geos)(Aeos)(Aeos)(Geos)(Aeo) | | |
| ENST00000266646_2390 | (Teos)(Geos)(Teos)(m5Ceos)(Aeos)(m5dCs)dAs(m5dCs)dGsdGs(m5dCs)(m5dCs) | A-3176637.1 | |
| | dTs(m5dCs)dTs(Geos)(Geos)(Aeos)(Aeos)(Aeo) | | |
| ENST00000266646_269 | (Geos)(Teos)(Geos)(m5Ceos)(Teos)(m5dCs)dGs(m5dCs)dAs(m5dCs)(m5dCs) | A-3176638.1 | |
| | dAsdGsdTsdGs(m5Ceos)(m5Ceos)(m5Ceos)(Aeos)(m5Ceo) | | |
| ENST00000266646_293 | (Aeos)(Geos)(Geos)(Geos)(Aeos)(m5dCs)dAs(m5dCs)dAs(m5dCs)dAsdGsdAs | A-3176639.1 | |
| | (m5dCs)(m5dCs)(m5Ceos)(Teos)(Geos)(Teos)(m5Ceo) | | |
| ENST00000266646_852 | (Teos)(Geos)(Teos)(m5Ceos)(m5Ceos)dTsdGs(m5dCs)dTsdGsdTsdGsdTs(m5dCs) | A-3176640.1 | |
| | (m5dCs)(Aeos)(Aeos)(Geos)(Aeos)(Geo) | | |
| ENST00000266646_1906 | (Geos)(Aeos)(m5Ceos)(Aeos)(Geos)dAsdGs(m5dCs)dGsdAsdGsdAs(m5dCs)dTs | A-3176641.1 | |
| | (m5dCs)(Geos)(Aeos)(Teos)(m5Ceos)(Teo) | | |
| ENST00000266646_773 | (Geos)(Teos)(Teos)(Teos)(m5Ceos)dAsdGsdGsdAs(m5dCs)dAs(m5dCs)(m5dCs) | A-3176642.1 | |
| | dAsdGs(Aeos)(m5Ceos)(Teos)(Teos)(m5Ceo) | | |
| ENST00000266646_1606 | (m5Ceos)(Aeos)(Teos)(m5Ceos)(Teos)dTsdGsdGsdGsdAsdGsdAsdGsdGs(m5dCs) | A-3176643.1 | |
| | (Teos)(Aeos)(Aeos)(Geos)(Teo) | | |
| ENST00000266646_2235 | (Aeos)(m5Ceos)(Teos)(Geos)(Teos)dTsdGs(m5dCs)dTs(m5dCs)dTsdGsdGsdAs | A-3176644.1 | |
| | (m5dCs)(m5Ceos)(Aeos)(Teos)(m5Ceos)(Aeo) | | |
| ENST00000266646_1054 | (Aeos)(Geos)(Geos)(Geos)(m5Ceos)dAs(m5dCs)dTsdGs(m5dCs)(m5dCs)(m5dCs) | A-3176645.1 | |
| | dAs(m5dCs)dTs(Geos)(m5Ceos)(Aeos)(Geos)(Teo) | | |
| ENST00000266646_385 | (Geos)(Geos)(Teos)(m5Ceos)(Aeos)dGsdGsdTsdGs(m5dCs)dAsdAs(m5dCs)(m5dCs) | A-3176646.1 | |
| | (m5dCs)(Aeos)(Teos)(m5Ceos)(m5Ceos)(Aeo) | | |
| ENST00000266646_1361 | (Geos)(Geos)(Geos)(Teos)(Geos)dTsdGsdGsdAsdTs(m5dCs)dAsdGsdGsdAs(Aeos) | A-3176647.1 | |
| | (Teos)(m5Ceos)(Teos)(Geo) | | |
| ENST00000266646_1547 | (Geos)(Aeos)(m5Ceos)(Aeos)(Teos)(m5dCs)dTsdTs(m5dCs)dTs(m5dCs)dAs(m5dCs) | A-3176648.1 | |
| | dAsdGs(Geos)(Aeos)(m5Ceos)(Teos)(Teo) | | |
| ENST00000266646_905 | (Geos)(Geos)(m5Ceos)(m5Ceos)(Teos)dGs(m5dCs)dTs(m5dCs)(m5dCs)dAsdGsdGs | A-3176649.1 | |
| | (m5dCs)dTs(m5Ceos)(Aeos)(Teos)(Teos)(Geo) | | |
| ENST00000266646_522 | (Geos)(m5Ceos)(Teos)(Geos)(Aeos)dAsdGsdTsdGsdGsdAsdGsdTs(m5dCs)dTs | A-3176650.1 | |
| | (Geos)(Teos)(Geos)(Aeos)(m5Ceo) | | |
| ENST00000266646_2270 | (Geos)(Geos)(Aeos)(m5Ceos)(m5Ceos)dTs(m5dCs)(m5dCs)(m5dCs) | A-3176651.1 | |
| | dAsdGsdAsdAsdGs(m5dCs)(m5Ceos)(Teos)(Aeos)(m5Ceos)(Aeo) | | |
| ENST00000266646_559 | (Aeos)(Geos)(Geos)(Aeos)(Geos)dTsdGsdGsdAs(m5dCs)dAsdGsdGsdTsdGs(Aeos) | A-3176652.1 | |
| | (Aeos)(Aeos)(Aeos)(Geo) | | |
| ENST00000266646_790 | (Teos)(m5Ceos)(Teos)(Geos)(m5Ceos)dAsdGsdTs(m5dCs)dTsdAsdGsdTsdTsdGs | A-3176653.1 | |
| | (m5Ceos)(Aeos)(Geos)(Teos)(Teo) | | |
| ENST00000266646_96 | (Aeos)(m5Ceos)(m5Ceos)(m5Ceos)(Teos)dTsdGsdGs(m5dCs)(m5dCs) | A-3176654.1 | |
| | dAsdAsdGsdGsdGs(Teos)(Aeos)(m5Ceos)(Aeos)(Geo) | | |
| ENST00000266646_2298 | (m5Ceos)(Teos)(Teos)(Teos)(Geos)dAs(m5dCs)dTsdTsdTsdGsdTsdGsdGsdAs | A-3176655.1 | |
| | (m5Ceos)(Aeos)(m5Ceos)(m5Ceos)(m5Ceo) | | |
| ENST00000266646_1221 | (Geos)(Teos)(m5Ceos)(Teos)(Teos)dGsdAs(m5dCs)(m5dCs)dAs(m5dCs) | A-3176656.1 | |
| | dAsdTsdTsdGs(m5Ceos)(m5Ceos)(Aeos)(Teos)(Teo) | | |
| ENST00000266646_172 | (m5Ceos)(Aeos)(Geos)(Teos)(Teos)dGs(m5dCs)dTs(m5dCs)(m5dCs)dGsdTs(m5dCs) | A-3176657.1 | |
| | dTsdGs(Teos)(Teos)(Geos)(Aeos)(Geo) | | |
| ENST00000266646_1422 | (Aeos)(Geos)(Teos)(Geos)(m5Ceos)(m5dCs)(m5dCs)dAsdTsdTsdTsdGsdGsdGsdTs | A-3176658.1 | |
| | (m5Ceos)(m5Ceos)(m5Ceos)(Aeos)(Teo) | | |
| ENST00000266646_2057 | (Aeos)(m5Ceos)(Aeos)(Teos)(Geos)dTsdTsdGsdAsdAsdAs(m5dCs)(m5dCs)dTs | A-3176659.1 | |
| | (m5dCs)(Geos)(Teos)(Teos)(Teos)(m5Ceo) | | |
| ENST00000266646_1149 | (Geos)(Aeos)(Geos)(Geos)(Teos)dAs(m5dCs)dTsdGsdGs(m5dCs)dAsdGsdGs(m5dCs) | A-3176660.1 | |
| | (m5Ceos)(Aeos)(Aeos)(Geos)(Geo) | | |
| ENST00000266646_352 | (Geos)(Geos)(m5Ceos)(Teos)(Aeos)dGs(m5dCs)dTs(m5dCs)(m5dCs)dAsdGs(m5dCs) | A-3176661.1 | |
| | dAs(m5dCs)(m5Ceos)(Aeos)(Geos)(Aeos)(Geo) | | |
| ENST00000266646_75 | (m5Ceos)(Aeos)(m5Ceos)(m5Ceos)(Teos)dGsdTs(m5dCs)dTsdTs(m5dCs) | A-3176662.1 | |
| | dTsdAsdTsdTs(Geos)(Teos)(m5Ceos)(Teos)(Geo) | | |
| ENST00000266646_2252 | (m5Ceos)(Aeos)(Geos)(Aeos)(Geos)dTsdAs(m5dCs)dAs(m5dCs)dTsdTsdGsdAsdAs | A-3176663.1 | |
| | (Geos)(Aeos)(Aeos)(m5Ceos)(Teo) | | |
| ENST00000266646_1853 | (Teos)(Geos)(m5Ceos)(Teos)(Teos)dGsdTs(m5dCs)dTs(m5dCs)(m5dCs)(m5dCs) | A-3176664.1 | |
| | dAsdGsdTs(Geos)(Geos)(Geos)(Teos)(m5Ceo) | | |
| ENST00000266646_585 | (m5Ceos)(Geos)(Geos)(Geos)(m5Ceos)dAsdTsdGsdGsdTsdAs(m5dCs)dAsdGsdGs | A-3176665.1 | |
| | (Teos)(Geos)(Geos)(Teos)(Geo) | | |
| ENST00000266646_1323 | (Geos)(m5Ceos)(m5Ceos)(m5Ceos)(Teos)dGsdTsdGs(m5dCs)(m5dCs) | A-3176666.1 | |
| | dTsdGsdGsdGsdAs(Aeos)(Aeos)(m5Ceos)(Teos)(Teo) | | |
| ENST00000266646_204 | (Geos)(Teos)(Geos)(Aeos)(Aeos)dTsdGsdGs(m5dCs)(m5dCs)(m5dCs)dTsdGsdGsdTs | A-3176667.1 | |
| | (Teos)(m5Ceos)(Aeos)(Geos)(Geo) | | |
| ENST00000266646_1719 | (Geos)(Aeos)(m5Ceos)(m5Ceos)(Teos)dTs(m5dCs)(m5dCs)(m5dCs) | A-3176668.1 | |
| | dTsdTsdAsdAsdGsdGs(Teos)(Aeos)(m5Ceos)(m5Ceos)(Teo) | | |
| ENST00000266646_239 | (Geos)(m5Ceos)(m5Ceos)(Aeos)(Geos)dAsdGs(m5dCs)dTsdGsdGsdAs(m5dCs) | A-3176669.1 | |
| | dAsdTs(m5Ceos)(Aeos)(Geos)(Geos)(Geo) | | |
| ENST00000266646_1384 | (Aeos)(Teos)(Teos)(Geos)(m5Ceos)(m5dCs)dAsdGsdGsdTsdGsdGsdTsdTsdGs(Teos) | A-3176670.1 | |
| | (Teos)(Geos)(Geos)(Geo) | | |
| ENST00000266646_1017 | (Teos)(m5Ceos)(Geos)(Geos)(Geos)(m5dCs)dTsdGs(m5dCs)dAsdGsdTsdAsdTs | A-3176671.1 | |
| | (m5dCs)(m5Ceos)(Aeos)(Geos)(Teos)(m5Ceo) | | |
| ENST00000266646_113 | (Aeos)(m5Ceos)(Aeos)(m5Ceos)(m5Ceos)dAs(m5dCs)dTsdGs(m5dCs)(m5dCs)dAs | A-3176672.1 | |
| | (m5dCs)dAs(m5dCs)(m5Ceos)(Teos)(Aeos)(m5Ceos)(m5Ceo) | | |
| ENST00000266646_1753 | (m5Ceos)(Aeos)(Teos)(m5Ceos)(m5Ceos)dTs(m5dCs)(m5dCs)(m5dCs)dTs(m5dCs) | A-3176673.1 | |
| | dAsdGs(m5dCs)dGs(m5Ceos)(m5Ceos)(Teos)(Teos)(Geo) | | |
| ENST00000266646_2197 | (Aeos)(m5Ceos)(Teos)(m5Ceos)(Aeos)(m5dCs)dAsdTsdTsdTsdGsdTsdTsdGsdAs | A-3176674.1 | |
| | (Teos)(Teos)(Teos)(Teos)(m5Ceo) | | |
| ENST00000266646_2441 | (Teos)(Aeos)(m5Ceos)(Aeos)(Aeos)dGs(m5dCs)dAs(m5dCs)dAs(m5dCs)dAsdTsdTs | A-3176675.1 | |
| | (m5dCs)(m5Ceos)(Aeos)(Teos)(Teos)(Aeo) | | |
| ENST00000266646_1297 | (Geos)(Geos)(Teos)(m5Ceos)(Teos)(m5dCs)dTsdTs(m5dCs)dAs(m5dCs)dTs(m5dCs) | A-3176676.1 | |
| | (m5dCs)dAs(Aeos)(Aeos)(Geos)(m5Ceos)(m5Ceo) | | |
| ENST00000266646_1272 | (Teos)(m5Ceos)(m5Ceos)(Teos)(m5Ceos)dTsdTsdGs(m5dCs)dTsdAsdGs(m5dCs) | A-3176677.1 | |
| | dTsdGs(m5Ceos)(Aeos)(Geos)(m5Ceos)(m5Ceo) | | |
| ENST00000266646_1694 | (Geos)(m5Ceos)(m5Ceos)(m5Ceos)(Teos)dTsdAs(m5dCs)(m5dCs)(m5dCs) | A-3176678.1 | |
| | dTsdGsdGsdGs(m5dCs)(m5Ceos)(Aeos)(Geos)(m5Ceos)(m5Ceo) | | |
| ENST00000266646_1786 | (Teos)(Teos)(Teos)(m5Ceos)(m5Ceos)dTsdGsdAs(m5dCs)dTs(m5dCs)(m5dCs) | A-3176679.1 | |
| | dTsdGsdTs(Teos)(Teos)(m5Ceos)(Teos)(Geo) | | |
| ENST00000266646_684 | (Aeos)(Geos)(Geos)(Aeos)(Geos)dAsdGsdTsdGs(m5dCs)dGsdGsdGsdAs(m5dCs) | A-3176680.1 | |
| | (m5Ceos)(m5Ceos)(Teos)(Teos)(Geo) | | |
| ENST00000266646_1674 | (Teos)(Geos)(m5Ceos)(Teos)(Teos)dAs(m5dCs)(m5dCs)(m5dCs)dTsdGs(m5dCs) | A-3176681.1 | |
| | dTsdTs(m5dCs)(Aeos)(Aeos)(Geos)(m5Ceos)(m5Ceo) | | |
| ENST00000266646_646 | (m5Ceos)(m5Ceos)(Aeos)(Teos)(m5Ceos)dGsdGsdAsdAsdGsdAsdTs(m5dCs)(m5dCs) | A-3176682.1 | |
| | dTs(m5Ceos)(Aeos)(Aeos)(Geos)(m5Ceo) | | |
| ENST00000266646_712 | (Geos)(m5Ceos)(m5Ceos)(m5Ceos)(Aeos)dGsdGsdTsdTsdGsdGsdTsdGsdAsdTs(Geos) | A-3176683.1 | |
| | (Teos)(Geos)(Geos)(Teo) | | |
| ENST00000266646_2351 | (Aeos)(Geos)(Aeos)(Teos)(Aeos)dAsdTsdGsdAsdGsdAsdAsdTsdTs(m5dCs)(Aeos) | A-3176684.1 | |
| | (Aeos)(Aeos)(Aeos)(Geo) | | |
| ENST00000266646_2373 | (Aeos)(Aeos)(Aeos)(Aeos)(m5Ceos)dTs(m5dCs)(m5dCs)dAs(m5dCs)dAsdAsdTsdAs | A-3176685.1 | |
| | (m5dCs)(Aeos)(Aeos)(Teos)(Teos)(Teo) | | |
| ENST00000266646_1197 | (Teos)(m5Ceos)(m5Ceos)(Aeos)(Geos)dGsdTsdAsdGsdAsdGsdGsdAsdGsdAs(Geos) | A-3176686.1 | |
| | (Aeos)(Geos)(Aeos)(Geo) | | |
| ENST00000266646_1175 | (Geos)(m5Ceos)(m5Ceos)(Teos)(Teos)(m5dCs)dGsdGsdGs(m5dCs) | A-3176687.1 | |
| | dAsdGsdTsdAsdGs(Geos)(Geos)(Aeos)(m5Ceos)(Aeo) | | |
| ENST00000266646_1340 | (Teos)(Geos)(m5Ceos)(m5Ceos)(Teos)(m5dCs)(m5dCs)dAsdGsdTs(m5dCs)dAs | A-3176688.1 | |
| | (m5dCs)dAsdGs(Aeos)(Teos)(Geos)(m5Ceos)(m5Ceo) | | |
| ENST00000266646_44 | (Geos)(Geos)(m5Ceos)(Teos)(Geos)dAsdAsdAsdGsdTsdAsdGsdAsdTs(m5dCs)(Aeos) | A-3176689.1 | |
| | (Teos)(m5Ceos)(Teos)(Geo) | | |
| ENST00000266646_1463 | (Aeos)(m5Ceos)(Aeos)(Teos)(m5Ceos)dAsdGs(m5dCs)(m5dCs)dAsdAs(m5dCs) | A-3176690.1 | |
| | (m5dCs)dTsdGs(Geos)(Aeos)(Aeos)(Teos)(Aeo) | | |
| ENST00000266646_444 | (m5Ceos)(Teos)(m5Ceos)(m5Ceos)(Geos)dGsdAsdGsdGsdGs(m5dCs)dTs(m5dCs) | A-3176691.1 | |
| | dTsdGs(Geos)(Teos)(m5Ceos)(Aeos)(Geo) | | |
| ENST00000266646_1103 | (m5Ceos)(Geos)(Geos)(m5Ceos)(Aeos)dGsdAsdAsdTsdGsdGsdAsdAsdAsdGs(Aeos) | A-3176692.1 | |
| | (Geos)(Geos)(m5Ceos)(Aeo) | | |
| ENST00000266646_2124 | (Aeos)(Teos)(m5Ceos)(Teos)(m5Ceos)dAsdTs(m5dCs)dAs(m5dCs)dTsdTs(m5dCs) | A-3176693.1 | |
| | dGsdGs(Geos)(Aeos)(Geos)(Geos)(m5Ceo) | | |
| ENST00000266646_2096 | (Geos)(Teos)(Geos)(Geos)(Aeos)dTs(m5dCs)dAsdAsdGsdAsdGsdGsdTs(m5dCs) | A-3176694.1 | |
| | (Aeos)(Aeos)(Geos)(Aeos)(Geo) | | |
| ENST00000266646_665 | (Geos)(Geos)(m5Ceos)(Geos)(m5Ceos)(m5dCs)dTs(m5dCs)(m5dCs)dTs(m5dCs) | A-3176695.1 | |
| | (m5dCs)dTsdTsdGs(Geos)(Teos)(m5Ceos)(m5Ceos)(m5Ceo) | | |
| ENST00000266646_2333 | (Aeos)(Geos)(Geos)(m5Ceos)(Aeos)dAsdAsdTsdAsdAs(m5dCs)dAsdTsdGsdTs(Teos) | A-3176696.1 | |
| | (Aeos)(Geos)(Teos)(Aeo) | | |
| ENST00000266646_976 | (Geos)(Teos)(m5Ceos)(Teos)(Aeos)(m5dCs)dGsdTsdAsdAsdTsdGsdGsdTs(m5dCs) | A-3176697.1 | |
| | (Teos)(m5Ceos)(Geos)(m5Ceos)(m5Ceo) | | |
| ENST00000266646_942 | (Geos)(Teos)(m5Ceos)(Geos)(m5Ceos)dAsdGsdGs(m5dCs)dTs(m5dCs)dAs(m5dCs) | A-3176698.1 | |
| | dAsdGs(Geos)(Teos)(Geos)(Geos)(Geo) | | |
| ENST00000266646_733 | (Geos)(Geos)(Geos)(m5Ceos)(Aeos)dGsdAsdGsdTsdTsdAsdAsdGsdGsdTs(Aeos) | A-3176699.1 | |
| | (Teos)(Geos)(m5Ceos)(m5Ceo) | | |
| ENST00000266646_1817 | (Aeos)(m5Ceos)(m5Ceos)(Aeos)(Geos)dGsdGsdAsdAs(m5dCs)dTsdTs(m5dCs) | A-3176700.1 | |
| | dTsdTs(Aeos)(Geos)(Geos)(m5Ceos)(Teo) | | |
| ENST00000266646_2161 | (Aeos)(Geos)(Aeos)(Aeos)(Aeos)dGsdTsdAsdTsdAsdAsdGs(m5dCs)(m5dCs)dAs | A-3176701.1 | |
| | (Geos)(Geos)(m5Ceos)(Geos)(m5Ceo) | | |
| ENST00000266646_496 | (Aeos)(Aeos)(Aeos)(Geos)(m5Ceos)dTsdGsdAsdTsdGsdAs(m5dCs)(m5dCs)dTs | A-3176702.1 | |
| | (m5dCs)(m5Ceos)(Teos)(m5Ceos)(m5Ceos)(m5Ceo) | | |
| ENST00000266646_604 | (Geos)(Aeos)(Geos)(m5Ceos)(Aeos)(m5dCs)dGsdTsdGs(m5dCs)dAsdGs(m5dCs) | A-3176703.1 | |
| | (m5dCs)dAs(m5Ceos)(Aeos)(Geos)(Geos)(m5Ceo) | | |
| ENST00000266646_1872 | (Aeos)(Geos)(Aeos)(Aeos)(Geos)dAsdAsdAsdGsdAsdAsdAsdGsdTsdAs(Teos)(Aeos) | A-3176704.1 | |
| | (Aeos)(Aeos)(Teo) | | |
| ENST00000266646_1526 | (Geos)(Geos)(Geos)(m5Ceos)(Aeos)dGsdGsdAsdAsdAsdTs(m5dCs)dAsdTsdGs | A-3176705.1 | |
| | (m5Ceos)(Teos)(Teos)(Teos)(m5Ceo) | | |
| ENST00000266646_2217 | (m5Ceos)(Aeos)(m5Ceos)(m5Ceos)(m5Ceos)dTsdAsdAs(m5dCs)(m5dCs)(m5dCs) | A-3176706.1 | |
| | dTsdTs(m5dCs)dTs(Teos)(Teos)(Aeos)(Teos)(Geo) | | |
| ENST00000266646_1238 | (m5Ceos)(m5Ceos)(Aeos)(Teos)(Aeos)dTs(m5dCs)dTsdGsdGs(m5dCs)dAs(m5dCs) | A-3176707.1 | |
| | dAsdTs(m5Ceos)(m5Ceos)(Geos)(Teos)(m5Ceo) | | |
| ENST00000266646_922 | (Geos)(Geos)(Teos)(m5Ceos)(m5Ceos)dTs(m5dCs)(m5dCs)dTs(m5dCs)(m5dCs) | A-3176708.1 | |
| | dTsdGsdGs(m5dCs)(m5Ceos)(m5Ceos)(Geos)(Geos)(m5Ceo) | | |
| ENST00000266646_1079 | (Teos)(Geos)(m5Ceos)(m5Ceos)(Teos)dGsdGsdGs(m5dCs)dTsdGs(m5dCs)(m5dCs) | A-3176709.1 | |
| | dAsdGs(m5Ceos)(m5Ceos)(Aeos)(Geos)(Geo) | | |
| ENST00000266646_23 | (Teos)(Geos)(Geos)(Aeos)(Teos)dAsdGs(m5dCs)dTsdGsdTsdGs(m5dCs)dTsdTs(Geos) | A-3176710.1 | |
| | (Aeos)(m5Ceos)(m5Ceos)(m5Ceo) | | |
| ENST00000266646_2022 | (Aeos)(Aeos)(Teos)(Teos)(Aeos)dGsdTsdGsdGsdGs(m5dCs)dGs(m5dCs)(m5dCs)dTs | A-3176711.1 | |
| | (Geos)(Teos)(Aeos)(Aeos)(Teo) | | |
| ENST00000266646_874 | (Aeos)(Aeos)(Geos)(m5Ceos)(Teos)(m5dCs)dTsdAsdGsdGsdAsdAsdGsdGsdGs | A-3176712.1 | |
| | (m5Ceos)(Teos)(Geos)(m5Ceos)(Teo) | | |
| ENST00000266646_2414 | (Teos)(Geos)(Teos)(m5Ceos)(Aeos)dGsdAsdAsdAsdGsdAsdTsdGsdAsdTs(Geos) | A-3176713.1 | |
| | (Teos)(Aeos)(Aeos)(Teo) | | |
| ENST00000266646_626 | (Aeos)(Aeos)(Aeos)(Geos)(Aeos)dGsdTsdGs(m5dCs)(m5dCs)dAsdGsdGsdAsdAs | A-3176714.1 | |
| | (Geos)(Geos)(Geos)(Teos)(Geo) | | |

TABLE 6
Single-Dose ASO Screen for INHBE in Hep3B cells

| Antisense | INHBE/gapdh | | INHBE/gapdh | |
|---|---|---|---|---|
| Oligonucleotide Name - | 10 nM | | 1 nM | |
| Alnylam Designation | mean | SD | mean | SD |
| A-3176625.1 | 51.192 | 0.603 | 93.091 | 1.689 |
| A-3176626.1 | 8.059 | 1.115 | 74.766 | 2.605 |
| A-3176627.1 | 27.184 | 2.748 | 104.884 | 7.820 |
| A-3176628.1 | 26.400 | 5.420 | 99.186 | 3.441 |
| A-3176629.1 | 21.365 | 4.263 | 92.178 | 4.841 |
| A-3176630.1 | 18.348 | 4.143 | 85.238 | 3.977 |
| A-3176631.1 | 31.065 | 2.242 | 82.673 | 5.501 |
| A-3176632.1 | 21.348 | 3.882 | 91.270 | 19.564 |
| A-3176633.1 | 23.428 | 0.452 | 85.927 | 1.955 |
| A-3176634.1 | 58.174 | 2.250 | 86.680 | 14.990 |
| A-3176635.1 | 30.935 | 1.635 | 107.367 | 12.928 |
| A-3176636.1 | 30.134 | 2.879 | 108.501 | 12.691 |
| A-3176637.1 | 41.079 | 1.351 | 110.259 | 4.245 |
| A-3176638.1 | 45.650 | 1.952 | 104.804 | 5.896 |
| A-3176639.1 | 49.022 | 2.092 | 110.324 | 11.820 |
| A-3176640.1 | 36.498 | 3.768 | 101.611 | 4.682 |
| A-3176641.1 | 18.946 | 3.360 | 91.703 | 3.943 |
| A-3176642.1 | 43.043 | 2.396 | 102.505 | 13.448 |
| A-3176643.1 | 58.410 | 4.227 | 114.161 | 17.325 |
| A-3176644.1 | 22.435 | 2.392 | 85.204 | 4.508 |
| A-3176645.1 | 40.724 | 3.082 | 98.422 | 13.411 |
| A-3176646.1 | 34.737 | 3.564 | 87.302 | 6.244 |
| A-3176647.1 | 47.141 | 1.009 | 92.879 | 6.005 |
| A-3176648.1 | 47.229 | 2.001 | 80.127 | 19.028 |
| A-3176649.1 | 103.484 | 4.492 | 95.801 | 3.731 |
| A-3176650.1 | 62.530 | 4.346 | 103.113 | 21.362 |
| A-3176651.1 | 33.491 | 1.963 | 97.878 | 33.861 |
| A-3176652.1 | 46.682 | 2.328 | 90.505 | 5.212 |
| A-3176653.1 | 46.690 | 3.856 | 95.193 | 2.577 |
| A-3176654.1 | 81.803 | 2.870 | 96.571 | 4.973 |
| A-3176655.1 | 23.367 | 2.439 | 89.955 | 3.694 |
| A-3176656.1 | 50.621 | 4.052 | 96.567 | 5.424 |
| A-3176657.1 | 43.979 | 2.624 | 98.563 | 1.943 |
| A-3176658.1 | 33.114 | 2.710 | 88.088 | 4.503 |
| A-3176659.1 | 28.785 | 1.812 | 89.803 | 2.435 |
| A-3176660.1 | 28.643 | 1.121 | 92.195 | 6.855 |
| A-3176661.1 | 31.450 | 1.403 | 88.997 | 3.281 |
| A-3176662.1 | 55.488 | 4.793 | 117.712 | 32.655 |
| A-3176663.1 | 41.608 | 2.154 | 93.474 | 5.595 |
| A-3176664.1 | 31.959 | 0.722 | 80.745 | 1.631 |
| A-3176665.1 | 58.038 | 4.692 | 97.514 | 2.907 |
| A-3176666.1 | 44.189 | 3.593 | 89.228 | 8.710 |
| A-3176667.1 | 80.541 | 3.170 | 97.269 | 5.151 |
| A-3176668.1 | 39.789 | 0.976 | 79.359 | 2.412 |
| A-3176669.1 | 49.085 | 3.293 | 89.408 | 5.140 |
| A-3176670.1 | 90.673 | 9.767 | 98.517 | 7.050 |
| A-3176671.1 | 40.467 | 2.213 | 95.310 | 71.768 |
| A-3176672.1 | 56.793 | 1.077 | 93.645 | 4.505 |
| A-3176673.1 | 37.695 | 1.452 | 72.950 | 14.812 |
| A-3176674.1 | 41.638 | 1.309 | 89.725 | 6.216 |
| A-3176675.1 | 53.549 | 3.826 | 108.649 | 25.494 |
| A-3176676.1 | 36.859 | 0.931 | 79.435 | 17.412 |
| A-3176677.1 | 39.240 | 5.511 | 86.177 | 8.146 |
| A-3176678.1 | 37.041 | 1.262 | 80.683 | 4.706 |
| A-3176679.1 | 47.681 | 2.196 | 95.029 | 17.729 |
| A-3176680.1 | 63.520 | 4.117 | 84.868 | 6.457 |
| A-3176681.1 | 48.092 | 4.264 | 86.458 | 27.868 |
| A-3176682.1 | 60.122 | 1.450 | 89.746 | 6.488 |
| A-3176683.1 | 52.770 | 2.661 | 79.356 | 4.009 |
| A-3176684.1 | 82.456 | 5.211 | 89.499 | 10.451 |
| A-3176685.1 | 64.430 | 1.923 | 97.314 | 1.501 |
| A-3176686.1 | 91.745 | 6.663 | 104.301 | 5.023 |
| A-3176687.1 | 63.608 | 6.412 | 96.022 | 9.206 |
| A-3176688.1 | 44.602 | 1.763 | 97.443 | 5.151 |
| A-3176689.1 | 79.137 | 3.742 | 101.440 | 11.939 |
| A-3176690.1 | 56.697 | 3.146 | 97.405 | 4.025 |
| A-3176691.1 | 55.203 | 3.092 | 106.389 | 15.186 |
| A-3176692.1 | 65.034 | 3.992 | 102.017 | 9.029 |
| A-3176693.1 | 24.934 | 1.017 | 71.277 | 3.138 |
| A-3176694.1 | 36.078 | 1.241 | 90.845 | 5.112 |
| A-3176695.1 | 66.832 | 1.621 | 95.640 | 2.202 |
| A-3176696.1 | 54.558 | 1.600 | 104.647 | 10.679 |
| A-3176697.1 | 48.591 | 1.822 | 96.709 | 9.787 |
| A-3176698.1 | 91.765 | 4.469 | 98.363 | 4.710 |
| A-3176699.1 | 66.474 | 2.024 | 102.313 | 7.744 |
| A-3176700.1 | 48.645 | 2.508 | 94.161 | 8.743 |
| A-3176701.1 | 47.411 | 0.925 | 100.947 | 4.900 |
| A-3176702.1 | 51.405 | 2.276 | 103.520 | 7.957 |
| A-3176703.1 | 40.230 | 1.318 | 92.059 | 2.618 |
| A-3176704.1 | 104.175 | 6.898 | 98.811 | 7.772 |
| A-3176705.1 | 39.979 | 2.464 | 90.747 | 8.034 |
| A-3176706.1 | 68.163 | 2.909 | 104.205 | 5.295 |
| A-3176707.1 | 45.798 | 1.461 | 92.025 | 5.975 |
| A-3176708.1 | 40.917 | 1.475 | 91.428 | 5.292 |
| A-3176709.1 | 38.277 | 4.085 | 95.297 | 2.152 |
| A-3176710.1 | 55.263 | 2.906 | 96.373 | 9.721 |
| A-3176711.1 | 41.687 | 0.437 | 102.038 | 4.486 |
| A-3176712.1 | 46.838 | 1.023 | 95.795 | 6.415 |
| A-3176713.1 | 48.598 | 1.431 | 98.072 | 7.452 |
| A-3176714.1 | 56.078 | 1.668 | 98.996 | 6.793 |

### EQUIVALENTS

[0882] Those skilled in the art will recognize, or be able to ascertain using no more than routine experimentation, many equivalents to the specific embodiments and methods described herein. Such equivalents are intended to be encompassed by the scope of the following claims.

The application's sequence listing, which the Patent Office published only in electronic form, follows.

SEQUENCE LISTING (1264 sequences)

SEQ ID NO: 1 - DNA, 8243 bp, Homo sapiens
  misc_feature 1..8243: note = >NM_000127.3 Homo sapiens exostosin glycosyltransferase 1 (EXT1), mRNA
  source 1..8243: mol_type = genomic DNA
aacattcggcgaccgaacgcggcggtcggcagcgttcgcgcgggggcctgcgaagcgctgctcggggccggcactgcccgcggggaggacgcgccgccgccgccacccagcgccgccgccgccgccgcctccagccgggccgccgcgcgtcccgggggccggccccgcgagcgcaggagtaaacaccgccggagtcttggagccgctgcagaagggaataaagagagatgcagggatttgtgaggttacggcgccccagctgcaagatgcactagccggctgaacccgggatcggctgacttgttggaaccggagtgctctgcacggagagtggtggatgagttgaagttgccttcccggggctcattttccacgctgccgagaggaatccgagaggcaaggcaatcacttcgtcttgccattgattgggtatcgggagctttttttttctcccctctctctttcttttcctccgtcttgttgcatgcaagaaaattacagtccgctgctcgcccgccctgggtgcgagatattcagccccgctctctcccgtgcattgtgcaacccaaagatgaaagaccgaaggggagaaagttaaagaaatcgcccacatgcgctggatcagtccacggcttggggaaaggcatccagagaaggtgggagcggagagtttgaagtctttacaggcgggaagatggcggactggagctgaaagtgttgattgggaaacttgggtgattcttgtgtttatttacaatcctcttgacccaggcaggacacatgcaggccaaaaaacgctatttcatcctgctctcagctggctcttgtctcgcccttttgttttatttcggaggcttgcagtttagggcatcgaggagccacagccggagagaagaacacagcggtaggaatggcttgcaccaccccagtccggatcatttctggccccgcttcccggacgctctgcgccccttcgttccttgggatcaattggaaaacgaggattccagcgtgcacatttccccccggcagaagcgagatgccaactccagcatctacaaaggcaagaagtgccgcatggagtcctgcttcgatttcaccctttgcaagaaaaacggcttcaaagtctacgtatacccacagcaaaaaggggagaaaatcgccgaaagttaccaaaacattctagcggccatcgagggctccaggttctacacctcggaccccagccaggcgtgcctctttgtcctgagtctggatactttagacagagaccagttgtcacctcagtatgtgcacaatttgagatccaaagtgcagagtctccacttgtggaacaatggtaggaatcatttaatttttaatttatattccggcacttggcctgactacaccgaggacgtggggtttgacatcggccaggcgatgctggccaaagccagcatcagtactgaaaacttccgacccaactttgatgtttctattcccctcttttctaaggatcatcccaggacaggaggggagagggggtttttgaagttcaacaccatccctcctctcaggaagtacatgctggtattcaaggggaagaggtacctgacagggataggatcagacaccaggaatgccttatatcacgtccataacggggaggacgttgtgctcctcaccacctgcaagcatggcaaagactggcaaaagcacaaggattctcgctgtgacagagacaacaccgagtatgagaagtatgattatcgggaaatgctgcacaatgccactttctgtctggttcctcgtggtcgcaggcttgggtccttcagattcctggaggctttgcaggctgcctgcgtccctgtgatgctcagcaatggatgggagttgccattctctgaagtgattaattggaaccaagctgccgtcataggcgatgagagattgttattacagattccttctacaatcaggtctattcatcaggataaaatcctagcacttagacagcagacacaattcttgtgggaggcttatttttcttcagttgagaagattgtattaactacactagagattattcaggacagaatattcaagcacatatcacgtaacagtttaatatggaacaaacatcctggaggattgttcgtactaccacagtattcatcttatctgggagattttccttactactatgctaatttaggtttaaagcccccctccaaattcactgcagtcatccatgcggtgacccccctggtctctcagtcccagccagtgttgaagcttctcgtggctgcagccaagtcccagtactgtgcccagatcatagttctatggaattgtgacaagcccctaccagccaaacaccgctggcctgccactgctgtgcctgtcgtcgtcattgaaggagagagcaaggttatgagcagccgttttctgccctacgacaacatcatcacagacgccgtgctcagccttgacgaggacacggtgctttcaacaacagaggtggatttcgccttcacagtgtggcagagcttccctgagaggattgtggggtaccccgcgcgcagccacttctgggataactctaaggagcggtggggatacacatcaaagtggacgaacgactactccatggtgttgacaggagctgctatttaccacaaatattatcactacctatactcccattacctgccagccagcctgaagaacatggtggaccaattggccaattgtgaggacattctcatgaacttcctggtgtctgctgtgacaaaattgcctccaatcaaagtgacccagaagaagcagtataaggagacaatgatgggacagacttctcgggcttcccgttgggctgaccctgaccactttgcccagcgacagagctgcatgaatacgtttgccagctggtttggctacatgccgctgatccactctcagatgaggctcgaccccgtcctctttaaagaccaggtctctattttgaggaagaaataccgagacattgagcgactttgaggaatccggctgagtgggggaggggaagcaagaagggatgggggtcaagctgctctctcttcccagtgcagatccactcatcagcagagccagattgtgccaactatccaaaaacttagatgagcagaatgacaaaaaaaaaaaggccaatgagaactcaactcctggctcctgggactgcaccagactgctccaaactcacctcactggcttctgtgtcccaagactaggttgtgtacagtttaattatggaacattaaataattatttttgaaatgattgctatgcaggtttaaacttttttaatgatcaaaactattaaaaaccagagttctttgtttaatcaaaattgtgttggttgtgaatatttcaaagctgctattccttttcccacagacatcattgtcatggccatgtagggtgccctgcagtttcaaaagctcaaacttcgtggaaaacacaataagtcactctacccattatcaagaaataactgagcataagttgtaacttcattattcaactttgccagtgcaaattgttttccacttcgaatcttcaaatccacttgaacttttatctctaaaatgtcgctgcatgaaagaaagtattacgacttccaggtaggcagttctaactgaaatctctatgtttgagatagatatatatgataatcgtttttcattgggggggtggggggaattagtaccaagaaaacactagtataattaagaaatgttcagtttgcacaaagaactatccagataacccaccagcatgttagtgagatggaaatacagacccacaacagtaacccaatacttgcaggggttgggggcacggttatagattcaaccattgacctaagtctgcgtagcactgggaagaggctttggtttagaagccaaggaataatgagtatattggggagaacagattatttacaagatgaactctttaatgtttgtgagaatctcaagtttcagagtttctcttttgagaaagaaaaaggggtaataaggtagaaattcacaccaatgaacaagaggattgctgcaaagtaactgaggagatgtctcgccattgggaccctaatgccatttttggtcaaacattgttttgagcaagaatctggcaaacaaaataatcaacaacaaatgtgaatatagtttcatttacttttaatttttaaatctgtggaaaagtttagttgtgcttcttgttaaaaagaacatttctatccctgaaaatgctatcttgggcttatgattattgttaaactccaagtataaactgaaaaaaaaaacatatccctaactctgttatgaaaaatggagacttctgatattaaatgctttcttctacttggaagaggccagagaaaacagggaagagaaagacattattgagtttgaccatgtattatgctgaataaacaataagcactttagagtccctccctcaaactctcatacatttcatatttcttttccatttattttcagttttgttttagaagaaaagttcatcagagaattttgttctgataatttcaagtggccatcttaggtcagtggaaaccgtaagtccattggactttacctcatcctttctttgtagacatctgggagaggaagaggagcttgtaatgatagcacggggatggtgctgtaaacaggagtgaaagtgtttgtggaagtccagagaagtgactcaacaggctacctagctgcagaacaaggagtagagcccacatatccagatggtgttttgagaggtgcgtagacagtgaaattcaattaaagagaggattttctcctcagcctcatgactcagaacagctccctaaatacctctctcatctaattggacccatccatagtccattctcaaacatgtgacattttcccctaagtagatgtgattatctcttaggcatttgttgaaaaataattcttaggtccatggtgcttgcacttgtgtcttttctataaaatgtttggtcttacaggtttcatgtcatttaagctgcacttctcagcaagttaaaagattagcagttaatctttattcatttggcctttgtgaatttgtatttaaattatttttttcaggattggcaaattattcttgtttctcctttaccaaaaaataaatgcgatattttgttcaatgaccccaaaaccaacttgaaacttaggtggtcatattggcttgcaaagcaatgtccctaattgtaccagtcagtcacacaagtggattcaaggacctgctttgccagattgacctgtcaccaagctcacaacacatatcctccacaaacaacatgtgttatgtgaagaaaaatggtaattataaataagaacaggatataacacacctttcatccactttaaatctccacagtttcattttatgtcattctctgagcaaatctctttgggatgtgagctagcgtgttcttctcccatttggaatataaggctgggaatagaacaatgcttaacaaatcagtgaagctcgacagtaatatgtaattttaattcagttaggaaagagttgtattgcattgcaacaagttgacaaatcatagccatctctgtagggtgtcaggaattatctcctggtcaactttaatgataactaggggtccctaagtgggctaacatgtgctgcattggagagaagccaagggctgagagtacagtgccaaccacgtaatgaattgcttgcagaaattccaaagaggactcagccacttatggatttccacacagcatcttttcccagctccacattaagacacaggatcttaaaagtaattttttaaaagctggctgtgtatttatttatatgaaagtgttataaatatcaaagcttacaaatacattaatacatatcacctttgttgaagctagcaaaatggctcaaaattgagactgtagagaaaaatccatgaaataatcacgatagtcataccacaaaagatagcatagctaggtgggcctacctggtcgtatcaacacactttcagatagatgcttcaaaaaaaaagggaaagcttgttactggaatcttatgtgcattacagtttaatttcttcttgtgacaaatggtgctcaaagaaggatcaatccggttgcatccttcaatttcccttttagaatgacttttggttttcattacagtaggctatgttagcctttattttggtggttctcaaatacctggtgacttgaaagagtattatgctggtggcctttcataaaggttactgaactttaatcaggggtgagatgaatgaatgtgaataggcctatatactattttttttaattaaaaaaaaaaaaaacagggcacttgatttaagaacaaacctgtttaaagggcaggatcagggggaagacagccttactaggttggaatctgaatgagattcttgctggacaaggctgaattatggatgcaaaagccaagcaaacttcccagacctggaagtgtcttgtgttcccttgggtctcttgagatctccagtatttaaaagtagcagttattgccatgaactctcaaataaaaatgctcctgcctcttacttgtgaatataatcaacatgcagccagtacatcaggaccgcagttgctgaattcatttacctagttcccctttacagcgactatggacaagaacctttcagttggttttgtcattcttggccagatttaaccaagaaatttctttcactatcagcctcattttctcaggcatgcttacagggacaaagttgttttgagttgagttctcagcaaataagcattaatatcaaactgtgctaaacttgtctcacttggtataagaacttcagcataaagagattagtttatcctttgacaccaagtcttttttttttctttgagacagagtcttgccctgtcacccaggctggaatgcattggtgtgatctcagctcagtcactgcaacctccgcctccccggttcaagcaattctcctgcctcaccctgcttagtagttgggattacaggcatgtgctaccacactgggctaatttttgtatatttattagagacagggttttgctatgttggccaggctggtctcaaactcctgacctcaggtgatccacctgcctctgcctcccaaagtgctgagattacaggtgtaagccactgcgcctggccccccttttttttttctttaaaaaaaaaaaaaagcttgggggattaagtaccctaagatagtggtctctcccatcagttcaataatgctgtacagaacctctggataaaaaagctgttatttacaccataattgtgatgatggatttgactcctcaaaaccatctctcccctttttgccctttccaaaaatcaaaggcttttgtctccatgagttttacctagtagggattgtagttgtcactggtctagagttccaatacattttatatcaggaacctcagtgagctacccagaattggaacttaacatggcccagcaactaggagaagaaggcaaaccttgagaaagctgagccctcaggatagcacagtctcacccttgtttaaaatcaagtcaggctagcctttcagtcactctggttttgtaatgatttgccttttaggcctcaggccatttgatttctgcaatagttttctgttcttctcctacaggaatacatccctgtcctttcggttgtaactattactaaaactagggctatgcaaatgacctggttaccatgtaatgaaccttgtgtacttattttgagagaacaatatgtataggatatgttgaggggcagaaagaaagacatcaaaaactggaactattttaggtggcaaattgtaacgcaaaaaacaaaagtataccttattttgtatacgatgtacacttgggacagagttttctaatatgttgccaatgtttttgtagtgtcaccacaggtcttttctgaagtgtttttcccatttgttatagagtattaatgacttagcgtaattaagccctcaagtatgtgtgagagagcgcgtgtgagaaaatacaaagccatagatattgatttacttcactgacctgtgtaactttatgtctgggtttcgccatccaagatagattgttttatagagagtgtcaccaaagactttttccttccaatttatagaagaaaaaaaaaagaaattattaataaatgacatgacttttca

SEQ ID NO: 2 - DNA, 8243 bp, Homo sapiens
  misc_feature 1..8243: note = Reverse Complement of SEQ ID NO:1
  source 1..8243: mol_type = genomic DNA
tgaaaagtcatgtcatttattaataatttcttttttttttcttctataaattggaaggaaaaagtctttggtgacactctctataaaacaatctatcttggatggcgaaacccagacataaagttacacaggtcagtgaagtaaatcaatatctatggctttgtattttctcacacgcgctctctcacacatacttgagggcttaattacgctaagtcattaatactctataacaaatgggaaaaacacttcagaaaagacctgtggtgacactacaaaaacattggcaacatattagaaaactctgtcccaagtgtacatcgtatacaaaataaggtatacttttgttttttgcgttacaatttgccacctaaaatagttccagtttttgatgtctttctttctgcccctcaacatatcctatacatattgttctctcaaaataagtacacaaggttcattacatggtaaccaggtcatttgcatagccctagttttagtaatagttacaaccgaaaggacagggatgtattcctgtaggagaagaacagaaaactattgcagaaatcaaatggcctgaggcctaaaaggcaaatcattacaaaaccagagtgactgaaaggctagcctgacttgattttaaacaagggtgagactgtgctatcctgagggctcagctttctcaaggtttgccttcttctcctagttgctgggccatgttaagttccaattctgggtagctcactgaggttcctgatataaaatgtattggaactctagaccagtgacaactacaatccctactaggtaaaactcatggagacaaaagcctttgatttttggaaagggcaaaaaggggagagatggttttgaggagtcaaatccatcatcacaattatggtgtaaataacagcttttttatccagaggttctgtacagcattattgaactgatgggagagaccactatcttagggtacttaatcccccaagcttttttttttttttaaagaaaaaaaaaaggggggccaggcgcagtggcttacacctgtaatctcagcactttgggaggcagaggcaggtggatcacctgaggtcaggagtttgagaccagcctggccaacatagcaaaaccctgtctctaataaatatacaaaaattagcccagtgtggtagcacatgcctgtaatcccaactactaagcagggtgaggcaggagaattgcttgaaccggggaggcggaggttgcagtgactgagctgagatcacaccaatgcattccagcctgggtgacagggcaagactctgtctcaaagaaaaaaaaaagacttggtgtcaaaggataaactaatctctttatgctgaagttcttataccaagtgagacaagtttagcacagtttgatattaatgcttatttgctgagaactcaactcaaaacaactttgtccctgtaagcatgcctgagaaaatgaggctgatagtgaaagaaatttcttggttaaatctggccaagaatgacaaaaccaactgaaaggttcttgtccatagtcgctgtaaaggggaactaggtaaatgaattcagcaactgcggtcctgatgtactggctgcatgttgattatattcacaagtaagaggcaggagcatttttatttgagagttcatggcaataactgctacttttaaatactggagatctcaagagacccaagggaacacaagacacttccaggtctgggaagtttgcttggcttttgcatccataattcagccttgtccagcaagaatctcattcagattccaacctagtaaggctgtcttccccctgatcctgccctttaaacaggtttgttcttaaatcaagtgccctgttttttttttttttaattaaaaaaaatagtatataggcctattcacattcattcatctcacccctgattaaagttcagtaacctttatgaaaggccaccagcataatactctttcaagtcaccaggtatttgagaaccaccaaaataaaggctaacatagcctactgtaatgaaaaccaaaagtcattctaaaagggaaattgaaggatgcaaccggattgatccttctttgagcaccatttgtcacaagaagaaattaaactgtaatgcacataagattccagtaacaagctttccctttttttttgaagcatctatctgaaagtgtgttgatacgaccaggtaggcccacctagctatgctatcttttgtggtatgactatcgtgattatttcatggatttttctctacagtctcaattttgagccattttgctagcttcaacaaaggtgatatgtattaatgtatttgtaagctttgatatttataacactttcatataaataaatacacagccagcttttaaaaaattacttttaagatcctgtgtcttaatgtggagctgggaaaagatgctgtgtggaaatccataagtggctgagtcctctttggaatttctgcaagcaattcattacgtggttggcactgtactctcagcccttggcttctctccaatgcagcacatgttagcccacttagggacccctagttatcattaaagttgaccaggagataattcctgacaccctacagagatggctatgatttgtcaacttgttgcaatgcaatacaactctttcctaactgaattaaaattacatattactgtcgagcttcactgatttgttaagcattgttctattcccagccttatattccaaatgggagaagaacacgctagctcacatcccaaagagatttgctcagagaatgacataaaatgaaactgtggagatttaaagtggatgaaaggtgtgttatatcctgttcttatttataattaccatttttcttcacataacacatgttgtttgtggaggatatgtgttgtgagcttggtgacaggtcaatctggcaaagcaggtccttgaatccacttgtgtgactgactggtacaattagggacattgctttgcaagccaatatgaccacctaagtttcaagttggttttggggtcattgaacaaaatatcgcatttattttttggtaaaggagaaacaagaataatttgccaatcctgaaaaaaataatttaaatacaaattcacaaaggccaaatgaataaagattaactgctaatcttttaacttgctgagaagtgcagcttaaatgacatgaaacctgtaagaccaaacattttatagaaaagacacaagtgcaagcaccatggacctaagaattatttttcaacaaatgcctaagagataatcacatctacttaggggaaaatgtcacatgtttgagaatggactatggatgggtccaattagatgagagaggtatttagggagctgttctgagtcatgaggctgaggagaaaatcctctctttaattgaatttcactgtctacgcacctctcaaaacaccatctggatatgtgggctctactccttgttctgcagctaggtagcctgttgagtcacttctctggacttccacaaacactttcactcctgtttacagcaccatccccgtgctatcattacaagctcctcttcctctcccagatgtctacaaagaaaggatgaggtaaagtccaatggacttacggtttccactgacctaagatggccacttgaaattatcagaacaaaattctctgatgaacttttcttctaaaacaaaactgaaaataaatggaaaagaaatatgaaatgtatgagagtttgagggagggactctaaagtgcttattgtttattcagcataatacatggtcaaactcaataatgtctttctcttccctgttttctctggcctcttccaagtagaagaaagcatttaatatcagaagtctccatttttcataacagagttagggatatgttttttttttcagtttatacttggagtttaacaataatcataagcccaagatagcattttcagggatagaaatgttctttttaacaagaagcacaactaaacttttccacagatttaaaaattaaaagtaaatgaaactatattcacatttgttgttgattattttgtttgccagattcttgctcaaaacaatgtttgaccaaaaatggcattagggtcccaatggcgagacatctcctcagttactttgcagcaatcctcttgttcattggtgtgaatttctaccttattacccctttttctttctcaaaagagaaactctgaaacttgagattctcacaaacattaaagagttcatcttgtaaataatctgttctccccaatatactcattattccttggcttctaaaccaaagcctcttcccagtgctacgcagacttaggtcaatggttgaatctataaccgtgcccccaacccctgcaagtattgggttactgttgtgggtctgtatttccatctcactaacatgctggtgggttatctggatagttctttgtgcaaactgaacatttcttaattatactagtgttttcttggtactaattccccccacccccccaatgaaaaacgattatcatatatatctatctcaaacatagagatttcagttagaactgcctacctggaagtcgtaatactttctttcatgcagcgacattttagagataaaagttcaagtggatttgaagattcgaagtggaaaacaatttgcactggcaaagttgaataatgaagttacaacttatgctcagttatttcttgataatgggtagagtgacttattgtgttttccacgaagtttgagcttttgaaactgcagggcaccctacatggccatgacaatgatgtctgtgggaaaaggaatagcagctttgaaatattcacaaccaacacaattttgattaaacaaagaactctggtttttaatagttttgatcattaaaaaagtttaaacctgcatagcaatcatttcaaaaataattatttaatgttccataattaaactgtacacaacctagtcttgggacacagaagccagtgaggtgagtttggagcagtctggtgcagtcccaggagccaggagttgagttctcattggcctttttttttttgtcattctgctcatctaagtttttggatagttggcacaatctggctctgctgatgagtggatctgcactgggaagagagagcagcttgacccccatcccttcttgcttcccctcccccactcagccggattcctcaaagtcgctcaatgtctcggtatttcttcctcaaaatagagacctggtctttaaagaggacggggtcgagcctcatctgagagtggatcagcggcatgtagccaaaccagctggcaaacgtattcatgcagctctgtcgctgggcaaagtggtcagggtcagcccaacgggaagcccgagaagtctgtcccatcattgtctccttatactgcttcttctgggtcactttgattggaggcaattttgtcacagcagacaccaggaagttcatgagaatgtcctcacaattggccaattggtccaccatgttcttcaggctggctggcaggtaatgggagtataggtagtgataatatttgtggtaaatagcagctcctgtcaacaccatggagtagtcgttcgtccactttgatgtgtatccccaccgctccttagagttatcccagaagtggctgcgcgcggggtaccccacaatcctctcagggaagctctgccacactgtgaaggcgaaatccacctctgttgttgaaagcaccgtgtcctcgtcaaggctgagcacggcgtctgtgatgatgttgtcgtagggcagaaaacggctgctcataaccttgctctctccttcaatgacgacgacaggcacagcagtggcaggccagcggtgtttggctggtaggggcttgtcacaattccatagaactatgatctgggcacagtactgggacttggctgcagccacgagaagcttcaacactggctgggactgagagaccaggggggtcaccgcatggatgactgcagtgaatttggaggggggctttaaacctaaattagcatagtagtaaggaaaatctcccagataagatgaatactgtggtagtacgaacaatcctccaggatgtttgttccatattaaactgttacgtgatatgtgcttgaatattctgtcctgaataatctctagtgtagttaatacaatcttctcaactgaagaaaaataagcctcccacaagaattgtgtctgctgtctaagtgctaggattttatcctgatgaatagacctgattgtagaaggaatctgtaataacaatctctcatcgcctatgacggcagcttggttccaattaatcacttcagagaatggcaactcccatccattgctgagcatcacagggacgcaggcagcctgcaaagcctccaggaatctgaaggacccaagcctgcgaccacgaggaaccagacagaaagtggcattgtgcagcatttcccgataatcatacttctcatactcggtgttgtctctgtcacagcgagaatccttgtgcttttgccagtctttgccatgcttgcaggtggtgaggagcacaacgtcctccccgttatggacgtgatataaggcattcctggtgtctgatcctatccctgtcaggtacctcttccccttgaataccagcatgtacttcctgagaggagggatggtgttgaacttcaaaaaccccctctcccctcctgtcctgggatgatccttagaaaagaggggaatagaaacatcaaagttgggtcggaagttttcagtactgatgctggctttggccagcatcgcctggccgatgtcaaaccccacgtcctcggtgtagtcaggccaagtgccggaatataaattaaaaattaaatgattcctaccattgttccacaagtggagactctgcactttggatctcaaattgtgcacatactgaggtgacaactggtctctgtctaaagtatccagactcaggacaaagaggcacgcctggctggggtccgaggtgtagaacctggagccctcgatggccgctagaatgttttggtaactttcggcgattttctcccctttttgctgtgggtatacgtagactttgaagccgtttttcttgcaaagggtgaaatcgaagcaggactccatgcggcacttcttgcctttgtagatgctggagttggcatctcgcttctgccggggggaaatgtgcacgctggaatcctcgttttccaattgatcccaaggaacgaaggggcgcagagcgtccgggaagcggggccagaaatgatccggactggggtggtgcaagccattcctaccgctgtgttcttctctccggctgtggctcctcgatgccctaaactgcaagcctccgaaataaaacaaaagggcgagacaagagccagctgagagcaggatgaaatagcgttttttggcctgcatgtgtcctgcctgggtcaagaggattgtaaataaacacaagaatcacccaagtttcccaatcaacactttcagctccagtccgccatcttcccgcctgtaaagacttcaaactctccgctcccaccttctctggatgcctttccccaagccgtggactgatccagcgcatgtgggcgatttctttaactttctccccttcggtctttcatctttgggttgcacaatgcacgggagagagcggggctgaatatctcgcacccagggcgggcgagcagcggactgtaattttcttgcatgcaacaagacggaggaaaagaaagagagaggggagaaaaaaaaagctcccgatacccaatcaatggcaagacgaagtgattgccttgcctctcggattcctctcggcagcgtggaaaatgagccccgggaaggcaacttcaactcatccaccactctccgtgcagagcactccggttccaacaagtcagccgatcccgggttcagccggctagtgcatcttgcagctggggcgccgtaacctcacaaatccctgcatctctctttattcccttctgcagcggctccaagactccggcggtgtttactcctgcgctcgcggggccggcccccgggacgcgcggcggcccggctggaggcggcggcggcggcggcgctgggtggcggcggcggcgcgtcctccccgcgggcagtgccggccccgagcagcgcttcgcaggcccccgcgcgaacgctgccgaccgccgcgttcggtcgccgaatgtt

SEQ ID NO: 3 - DNA, 3478 bp, Mus musculus
  misc_feature 1..3478: note = >NM_010162.2 Mus musculus exostosin glycosyltransferase 1 (Ext1), mRNA
  source 1..3478: mol_type = genomic DNA
gcgctgtcgtgtcgggaatggaatgtgtaagtgtaacattcagaaccgggtaacattcggcgaccgaacgcggcggtcggcagtgatagcgcggggcctgcgaagcaccgctcggggccggcactgcccgcggggaggacgcgccgccgccgccgccccgcgccgcctcgtgccgccggccgggccgccgcgcgcccggggagccggccccgtgagcgcaggagtaaacaccggcggagtgtgggagccgctgcagaagggaataaagagacatgcagggatttgtgaggttacggcgccccagctgcaagatgcactagccggctgaagccggggcggattgacttgttggaaccgtagtgctctgcaccggagtgtggatgagttgaagttgctttccccgggctcgttctccacgccgccgagaggaatccgagcggagaggcagtcacttcgtcttgccattgattgggtatcgggagctttttcttccctgctctctttcttttcctccgtcttgttgcatgcaagaaaattacagtccgctgttcgcccgccctgggtgcgagatcttctgcccggctctctcccgtgcattgtgcagcccaaagatgaaagaccgaaggggagaaagttaaagaaatcgcccacatgcgctggatcagtccacggcttggggaaaggcatccagagaaggtgggagcggagagtttgaagtctttacaggcgggaagatggcggactggagctgaaagtgttgattgggaaacttgggtgattcttgtgtttatttacaatcctcttgacccaggcaggacacatgcaggccaaaaaacgctatttcatcctgctctcagctggctcttgtctcgcccttttgttttattttggaggcgtgcagtttagggcatcgaggagccacagccggagagaagagcacagtggtcggaatggcttgcaccagcccagtccggatcatttctggccccgcttcccggacgctctgcgccctttctttccttgggatcaattggaaaacgaggattccagcgtgcacatttccccccggcagaagcgagacgccaactcgagcatctacaaaggcaagaagtgccgcatggagtcctgcttcgatttcaccctttgcaagaaaaacggcttcaaagtctacgtgtacccgcagcagaaaggggagaaaatcgccgaaagttaccaaaacattctagcggccatcgagggctccaggttctacacctcggaccccagccaggcgtgcctctttgtcttgagtctggatactttagacagagaccagttatcacctcagtatgtgcacaatttgagatccaaagtgcagagtctccacttgtggaacaatggtaggaatcatttaatttttaatttatattctggcacttggcctgactacactgaggacgtggggtttgacatcggccaggcgatgctggccaaagccagcatcagtactgaaaacttccgaccaaactttgatgtttctattcccctcttttctaaggatcatcccaggacaggaggggagagggggtttttgaaatttaacaccatccctcctctcaggaagtacatgctggtattcaaggggaagcggtacctgacagggatagggtcagacaccaggaatgccttatatcacgtccataacggggaggacgtcttgctcctcaccacctgcaagcatggcaaagactggcaaaagcacaaggattctcgctgtgacagagacaacaccgagtatgagaaatatgattatcgggaaatgctgcacaatgccactttctgtctggttcctcgtggtcgcaggcttgggtccttcagattcctggaggctttgcaggctgcctgtgtccctgtaatgctcagcaacggatgggagttgccattctccgaagtgattaattggaaccaagctgccgtcataggcgatgagagattgctattacagattccttctacaatcaggtctattcatcaggataaaatcctagcacttagacagcagacacagttcttgtgggaggcttatttttcttcagttgagaagattgtattaactacactagagattattcaggacagaatattcaagcacatatcacgtaacagtttaatatggaacaaacatcctggaggattgttcgtcctaccgcagtattcatcttacctgggagatttcccttactactatgctaatttaggtttaaagcccccctccaaattcactgcagtcatccatgctgtgactcccctggtctctcagtcccagccagtgttgaagcttcttgtggctgcagccaaatcccagtactgtgcgcagatcatagttctgtggaattgtgacaagcctctaccagccaaacatcgctggcctgccactgccgtgcctgtcatcgtcattgaaggagaaagcaaggttatgagcagccggtttctgccctatgacaacatcatcactgatgctgtgctcagcctggatgaggacactgtgctttcaactacggaagtggattttgccttcaccgtatggcagagcttcccagagaggattgtgggatatcctgctcgcagtcatttctgggataactcaaaggagcggtggggatatacatccaagtggacgaatgactactccatggtgttgacaggagctgctatctaccacaaatattatcactacctgtattcccattacctgccagccagcctgaagaacatggtagaccaactggccaactgtgaggacattctcatgaatttcctggtgtctgctgtgacaaaattgcctccaatcaaagtgacccagaagaaacagtataaggagacaatgatgggacagacttcccgagcatcccgctgggccgaccctgaccactttgcccagcgacagagctgcatgaatacatttgccagctggtttggctacatgccgctgatccattctcagatgaggctggacccggtcctctttaaagaccaagtctcaattctgaggaagaaatacagagacattgaacgactttgaggaagcccaccgagtgggggaggggaagcaagacgggcgtccagctgctctctcctccttcccaatgcagatccgctcacgcccagcagtggagccagactgtgccaagtatcaaaaaatcaaaaaaaatcaaaaaacaaaaaaaacaaaaaagacaaaaaaagaaaaaggaaaaaataaacagcttagatgaacacagtgacaaaactcggctggaatcctggctcctggggctgcgccagactgctccattcacctcactggcttctgtgtcccacaactaggttgtgtacagtttaattatggaacattaaataattatttttgaaatgattgctatgcaggtttaaacttttttaatgatcaaaactattaaaaaccagagttctttctttaatcaaaaaaaaaaaaaaaaaa

SEQ ID NO: 4 - DNA, 3478 bp, Mus musculus
  misc_feature 1..3478: note = Reverse Complement of SEQ ID NO:3
  source 1..3478: mol_type = genomic DNA
ttttttttttttttttttgattaaagaaagaactctggtttttaatagttttgatcattaaaaaagtttaaacctgcatagcaatcatttcaaaaataattatttaatgttccataattaaactgtacacaacctagttgtgggacacagaagccagtgaggtgaatggagcagtctggcgcagccccaggagccaggattccagccgagttttgtcactgtgttcatctaagctgtttattttttcctttttctttttttgtcttttttgttttttttgttttttgattttttttgattttttgatacttggcacagtctggctccactgctgggcgtgagcggatctgcattgggaaggaggagagagcagctggacgcccgtcttgcttcccctcccccactcggtgggcttcctcaaagtcgttcaatgtctctgtatttcttcctcagaattgagacttggtctttaaagaggaccgggtccagcctcatctgagaatggatcagcggcatgtagccaaaccagctggcaaatgtattcatgcagctctgtcgctgggcaaagtggtcagggtcggcccagcgggatgctcgggaagtctgtcccatcattgtctccttatactgtttcttctgggtcactttgattggaggcaattttgtcacagcagacaccaggaaattcatgagaatgtcctcacagttggccagttggtctaccatgttcttcaggctggctggcaggtaatgggaatacaggtagtgataatatttgtggtagatagcagctcctgtcaacaccatggagtagtcattcgtccacttggatgtatatccccaccgctcctttgagttatcccagaaatgactgcgagcaggatatcccacaatcctctctgggaagctctgccatacggtgaaggcaaaatccacttccgtagttgaaagcacagtgtcctcatccaggctgagcacagcatcagtgatgatgttgtcatagggcagaaaccggctgctcataaccttgctttctccttcaatgacgatgacaggcacggcagtggcaggccagcgatgtttggctggtagaggcttgtcacaattccacagaactatgatctgcgcacagtactgggatttggctgcagccacaagaagcttcaacactggctgggactgagagaccaggggagtcacagcatggatgactgcagtgaatttggaggggggctttaaacctaaattagcatagtagtaagggaaatctcccaggtaagatgaatactgcggtaggacgaacaatcctccaggatgtttgttccatattaaactgttacgtgatatgtgcttgaatattctgtcctgaataatctctagtgtagttaatacaatcttctcaactgaagaaaaataagcctcccacaagaactgtgtctgctgtctaagtgctaggattttatcctgatgaatagacctgattgtagaaggaatctgtaatagcaatctctcatcgcctatgacggcagcttggttccaattaatcacttcggagaatggcaactcccatccgttgctgagcattacagggacacaggcagcctgcaaagcctccaggaatctgaaggacccaagcctgcgaccacgaggaaccagacagaaagtggcattgtgcagcatttcccgataatcatatttctcatactcggtgttgtctctgtcacagcgagaatccttgtgcttttgccagtctttgccatgcttgcaggtggtgaggagcaagacgtcctccccgttatggacgtgatataaggcattcctggtgtctgaccctatccctgtcaggtaccgcttccccttgaataccagcatgtacttcctgagaggagggatggtgttaaatttcaaaaaccccctctcccctcctgtcctgggatgatccttagaaaagaggggaatagaaacatcaaagtttggtcggaagttttcagtactgatgctggctttggccagcatcgcctggccgatgtcaaaccccacgtcctcagtgtagtcaggccaagtgccagaatataaattaaaaattaaatgattcctaccattgttccacaagtggagactctgcactttggatctcaaattgtgcacatactgaggtgataactggtctctgtctaaagtatccagactcaagacaaagaggcacgcctggctggggtccgaggtgtagaacctggagccctcgatggccgctagaatgttttggtaactttcggcgattttctcccctttctgctgcgggtacacgtagactttgaagccgtttttcttgcaaagggtgaaatcgaagcaggactccatgcggcacttcttgcctttgtagatgctcgagttggcgtctcgcttctgccggggggaaatgtgcacgctggaatcctcgttttccaattgatcccaaggaaagaaagggcgcagagcgtccgggaagcggggccagaaatgatccggactgggctggtgcaagccattccgaccactgtgctcttctctccggctgtggctcctcgatgccctaaactgcacgcctccaaaataaaacaaaagggcgagacaagagccagctgagagcaggatgaaatagcgttttttggcctgcatgtgtcctgcctgggtcaagaggattgtaaataaacacaagaatcacccaagtttcccaatcaacactttcagctccagtccgccatcttcccgcctgtaaagacttcaaactctccgctcccaccttctctggatgcctttccccaagccgtggactgatccagcgcatgtgggcgatttctttaactttctccccttcggtctttcatctttgggctgcacaatgcacgggagagagccgggcagaagatctcgcacccagggcgggcgaacagcggactgtaattttcttgcatgcaacaagacggaggaaaagaaagagagcagggaagaaaaagctcccgatacccaatcaatggcaagacgaagtgactgcctctccgctcggattcctctcggcggcgtggagaacgagcccggggaaagcaacttcaactcatccacactccggtgcagagcactacggttccaacaagtcaatccgccccggcttcagccggctagtgcatcttgcagctggggcgccgtaacctcacaaatccctgcatgtctctttattcccttctgcagcggctcccacactccgccggtgtttactcctgcgctcacggggccggctccccgggcgcgcggcggcccggccggcggcacgaggcggcgcggggcggcggcggcggcgcgtcctccccgcgggcagtgccggccccgagcggtgcttcgcaggccccgcgctatcactgccgaccgccgcgttcggtcgccgaatgttacccggttctgaatgttacacttacacattccattcccgacacgacagcgc

SEQ ID NO: 5 - DNA, 3474 bp, Rattus norvegicus
  misc_feature 1..3474: note = >NM_001130540.1 Rattus norvegicus exostosin glycosyltransferase 1 (Ext1), mRNA
  source 1..3474: mol_type = genomic DNA
gagcggagagtttgaagtctttacaggcgggaagatggcggactggagctgaaagtgttgattgggaaacttgggtgattcttgtgtttatttacaatcctcttgacccaggcaggacacatgcaggccaaaaaacgctatttcatcctgctctcagctggctcttgtctcgcccttttgttttattttggaggcgtgcagtttagggcatcgaggagccacagccggagagaagagcacagtggtcggaatggcttgcaccaacccagtccggatcatttctggccccgcttcccggacgctctgcgccccttctttccttgggatcaattggaaaacgaggattccagcgtgcacatttccccccggcagaagcgggacgccaactcgagcatctacaaaggcaagaagtgccgcatggagtcctgcttcgatttcaccctttgcaagaaaaacggcttcaaagtctacgtctacccgcagcagaaaggggagaaaattgccgaaagttaccaaaacattctagcggccatcgagggctccaggttctacacctcggaccccagccaggcgtgcctctttgtcctgagtctggatactttagacagagaccagttatcacctcagtatgtgcacaatttgagatccaaagtgcagagtctccacttgtggaacaatggtaggaatcatttaatttttaatttatattctggcacttggcctgactacaccgaggacgtggggtttgacatcggccaggcgatgctggccaaagccagcatcagtactgaaaacttccgaccaaactttgatgtttctattcccctcttttctaaggatcatcccaggacaggaggggagagggggtttttgaaatttaacaccatccctcccctcaggaagtacatgctggtattcaaggggaagaggtacctgacagggatagggtcagacaccaggaatgccttatatcacgtccataacggggaggacgtcttgctcctcaccacctgcaagcatggcaaagactggcaaaagcacaaggattctcgctgtgacagagacaacaccgagtatgagaaatatgattatcgggaaatgctgcacaatgccactttctgtctggttcctcgtggtcgcaggcttgggtccttcagattcctggaggctttgcaggctgcctgtgtccctgtaatgctcagcaatggatgggagttgccattctccgaagtgataaattggaaccaagctgccgtcataggcgatgagagattgctattacagattccttctacaatcaggtctattcatcaggataaaatcctagcacttagacagcagacacagttcttgtgggaggcttatttttcttcagttgagaagattgtattaactacactagagattattcaggacagaatattcaagcacatatcacgtaacagtttaatatggaacaaacatcctggaggattgttcgtcctaccacagtattcatcctacctgggagattttccttactactatgctaatttaggtctaaagcccccctccaaattcactgcagtcatccatgctgtgacccccctggtctctcagtcccagccagtgttgaagcttcttgtggcagcagccaaatcccagtactgtgcacagattatagttctgtggaattgtgacaagcctctaccagccaaacaccgctggcctgccactgccgtgcctgtcatcgtcattgaaggagaaagcaaggttatgagcagccggtttctgccctatgacaacatcatcactgatgctgtgctcagccttgatgaggacactgtgctttcaaccacggaagtggattttgccttcactgtatggcagagcttcccggagaggattgtgggatatcctgcacgcagccatttctgggataactcaaaggagcgatggggatatacatccaagtggacgaatgactactccatggtgttgacaggagctgctatctaccacaaatattatcactacctgtattcccattacctgccagccagcctgaagaacatggtagaccaactggccaactgtgaggacattctcatgaatttcctggtgtctgctgtgacgaaattgcctccaatcaaagtgacccagaagaaacagtataaggagacaatgatgggacagacttcccgagcatctcgctgggctgaccctgaccactttgcccagcgacagagctgcatgaatacgtttgccagctggtttggctacatgccgctgatccactctcagatgaggctcgacccggtcctctttaaagaccaagtctcaatcctgaggaagaaatacagagacattgaacgactttgaggaatcccactgagtgggggaggggaggcaagatgggactggagtccagttgctctctcctcccagtgcagatctgctcatgcccatcggtggagccagactgtgccaagtatcaaaaaatgaaaaaaaaataaatataaaaaaaacaaaaaagattttaaaaaagaaaaggaaaaaaacagcttagatgaacacagtgacaaaactcggctggaatcctggctcctggggccgcgccagactgctccattcacctcactggcttctgtgtcccacgactaggttgtgtacagtttaattatggaacattaaataattatttttgaaatgattgctatgcaggtttaaacttttttaatgatcaaaactattaaaaaccagagttctttctttaatcaaaattgtgttggttgtgaatatttctaagctgatgctcccctccctacagacctcgttgccatgggtcacccaggatttcctgcaatgacagaaacagacatcatgggaaacacaatcagttatttgacatagtgtcagcaaagcactgggcatacactaaaacaagttcatagtccagtttagatgtttggattcccctcagtctctaaacttgctgcatgagaaaaggtgttgactccaggtaggcagttctaactgaaaaattttaatataaatatggtaatctttttacatggggatagggaggggggagatagaccaagcaaacaagcaaacactagtagatttaagaaatgttgaacaagaaaccaaacaatccccagcatgttagtgatggaaatcccacaactgaaacccaatacgtcctaatggttggtcaataggctcaaccaccaacccatatatcttttgggggaaccctatgctttagaagccaaagggggaaaaatgggtccagattatttataagacaagtggtttaatgtgtttggaaaaactcaagttgcaaaggtttctctgttgaaaaagaagcgattatgtgtaactccacaccgtttaacaagaggatgactgtgaaaaaggtacctaactgggggcatgtcttgtcaaggaacttattgggataatcattgatttaagcaaaaaaaaaaaaaa

SEQ ID NO: 6 - DNA, 3474 bp, Rattus norvegicus
  misc_feature 1..3474: note = Reverse Complement of SEQ ID NO:5
  source 1..3474: mol_type = genomic DNA
ttttttttttttttgcttaaatcaatgattatcccaataagttccttgacaagacatgcccccagttaggtacctttttcacagtcatcctcttgttaaacggtgtggagttacacataatcgcttctttttcaacagagaaacctttgcaacttgagtttttccaaacacattaaaccacttgtcttataaataatctggacccatttttccccctttggcttctaaagcatagggttcccccaaaagatatatgggttggtggttgagcctattgaccaaccattaggacgtattgggtttcagttgtgggatttccatcactaacatgctggggattgtttggtttcttgttcaacatttcttaaatctactagtgtttgcttgtttgcttggtctatctcccccctccctatccccatgtaaaaagattaccatatttatattaaaatttttcagttagaactgcctacctggagtcaacaccttttctcatgcagcaagtttagagactgaggggaatccaaacatctaaactggactatgaacttgttttagtgtatgcccagtgctttgctgacactatgtcaaataactgattgtgtttcccatgatgtctgtttctgtcattgcaggaaatcctgggtgacccatggcaacgaggtctgtagggaggggagcatcagcttagaaatattcacaaccaacacaattttgattaaagaaagaactctggtttttaatagttttgatcattaaaaaagtttaaacctgcatagcaatcatttcaaaaataattatttaatgttccataattaaactgtacacaacctagtcgtgggacacagaagccagtgaggtgaatggagcagtctggcgcggccccaggagccaggattccagccgagttttgtcactgtgttcatctaagctgtttttttccttttcttttttaaaatcttttttgttttttttatatttatttttttttcattttttgatacttggcacagtctggctccaccgatgggcatgagcagatctgcactgggaggagagagcaactggactccagtcccatcttgcctcccctcccccactcagtgggattcctcaaagtcgttcaatgtctctgtatttcttcctcaggattgagacttggtctttaaagaggaccgggtcgagcctcatctgagagtggatcagcggcatgtagccaaaccagctggcaaacgtattcatgcagctctgtcgctgggcaaagtggtcagggtcagcccagcgagatgctcgggaagtctgtcccatcattgtctccttatactgtttcttctgggtcactttgattggaggcaatttcgtcacagcagacaccaggaaattcatgagaatgtcctcacagttggccagttggtctaccatgttcttcaggctggctggcaggtaatgggaatacaggtagtgataatatttgtggtagatagcagctcctgtcaacaccatggagtagtcattcgtccacttggatgtatatccccatcgctcctttgagttatcccagaaatggctgcgtgcaggatatcccacaatcctctccgggaagctctgccatacagtgaaggcaaaatccacttccgtggttgaaagcacagtgtcctcatcaaggctgagcacagcatcagtgatgatgttgtcatagggcagaaaccggctgctcataaccttgctttctccttcaatgacgatgacaggcacggcagtggcaggccagcggtgtttggctggtagaggcttgtcacaattccacagaactataatctgtgcacagtactgggatttggctgctgccacaagaagcttcaacactggctgggactgagagaccaggggggtcacagcatggatgactgcagtgaatttggaggggggctttagacctaaattagcatagtagtaaggaaaatctcccaggtaggatgaatactgtggtaggacgaacaatcctccaggatgtttgttccatattaaactgttacgtgatatgtgcttgaatattctgtcctgaataatctctagtgtagttaatacaatcttctcaactgaagaaaaataagcctcccacaagaactgtgtctgctgtctaagtgctaggattttatcctgatgaatagacctgattgtagaaggaatctgtaatagcaatctctcatcgcctatgacggcagcttggttccaatttatcacttcggagaatggcaactcccatccattgctgagcattacagggacacaggcagcctgcaaagcctccaggaatctgaaggacccaagcctgcgaccacgaggaaccagacagaaagtggcattgtgcagcatttcccgataatcatatttctcatactcggtgttgtctctgtcacagcgagaatccttgtgcttttgccagtctttgccatgcttgcaggtggtgaggagcaagacgtcctccccgttatggacgtgatataaggcattcctggtgtctgaccctatccctgtcaggtacctcttccccttgaataccagcatgtacttcctgaggggagggatggtgttaaatttcaaaaaccccctctcccctcctgtcctgggatgatccttagaaaagaggggaatagaaacatcaaagtttggtcggaagttttcagtactgatgctggctttggccagcatcgcctggccgatgtcaaaccccacgtcctcggtgtagtcaggccaagtgccagaatataaattaaaaattaaatgattcctaccattgttccacaagtggagactctgcactttggatctcaaattgtgcacatactgaggtgataactggtctctgtctaaagtatccagactcaggacaaagaggcacgcctggctggggtccgaggtgtagaacctggagccctcgatggccgctagaatgttttggtaactttcggcaattttctcccctttctgctgcgggtagacgtagactttgaagccgtttttcttgcaaagggtgaaatcgaagcaggactccatgcggcacttcttgcctttgtagatgctcgagttggcgtcccgcttctgccggggggaaatgtgcacgctggaatcctcgttttccaattgatcccaaggaaagaaggggcgcagagcgtccgggaagcggggccagaaatgatccggactgggttggtgcaagccattccgaccactgtgctcttctctccggctgtggctcctcgatgccctaaactgcacgcctccaaaataaaacaaaagggcgagacaagagccagctgagagcaggatgaaatagcgttttttggcctgcatgtgtcctgcctgggtcaagaggattgtaaataaacacaagaatcacccaagtttcccaatcaacactttcagctccagtccgccatcttcccgcctgtaaagacttcaaactctccgctc

SEQ ID NO: 7 - DNA, 2975 bp, Macaca mulatta
  misc_feature 1..2975: note = >NM_001258133.1 Macaca mulatta exostosin glycosyltransferase 1 (EXT1), mRNA
  source 1..2975: mol_type = genomic DNA
gagtcttggagccgctgcagaagggaataaagagagatgcagggatttgtgaggttacggcgccccagctgcaagatgcactagccggctgaacccgggatcggctgacttgttggaaccggagtgctctgcacggagagtggtggatgagttgaagttgccttcccggggctcattttccacgctgccgagaggaatccgagaggcaaggcaatcacttcgtcttgccattgattgggtatcgggagcttttttttttctcccctctctctttcttttcctccgtcttgttgcatgcaagaaaattacagtccgctgctcgcccgccctgggtgcgagatattcagccccgctctctcccgtgcattgtgcaacccaaagatgaaagaccgaaggggagaaagttaaagaaatcgcccacatgcgctggatcagtccacggcttggggaaaggcatccagagaaggtgggagcggagagtttgaagtctttacaggcgggaagatggcggactggagctgaaagtgttgattgggaaacttgggtgattcttgtgtttatttacaatcctcttgacccaggcaggacacatgcaggccaaaaaacgctatttcatcctgctctcagctggctcttgtctcgcccttttgttttatttcggaggcttgcagtttagggcatcgaggagccacagccggagagaagagcacagcggtcggaatggcttgcaccaccccagtccggatcatttctggccccgcttcccggacgctctgcgccccttcgttccttgggatcaattggaaaacgaggattctagcgtgcacatttccccccggcagaagcgagatgccaactcgagcatctacaaaggcaagaagtgccgcatggagtcctgcttcgatttcaccctttgcaagaaaaacggcttcaaagtctacgtatacccgcagcaaaaaggggagaaaatcgccgaaagttaccaaaacattctagcggccatcgagggctccaggttctatacctcggaccccagccaggcgtgcctctttgtcctgagtctggatactttagacagagaccagttgtcacctcagtatgtgcacaatttgagatccaaagtgcagagtctccacttgtggaacaatggtaggaatcatttaatttttaatttatattccggcacttggcctgactacaccgaggacgtggggtttgacatcggccaggcgatgctggccaaagccagcatcagtactgaaaacttccgacccaactttgatgtttctattcccctattttctaaggatcatcccaggacaggaggggagagggggtttttgaagttcaacaccatccctcctctcaggaagtacatgctggtattcaaggggaagaggtacctgacagggatagggtcagacaccaggaatgccttatatcacgtccataacggggaggacgttgtgctcctcaccacctgcaagcatggcaaagactggcaaaagcacaaggattctcgctgtgacagagacaacaccgagtatgagaagtatgattatcgggaaatgctgcacaatgccactttctgtctggttcctcgtggtcgcaggcttgggtccttcagattcctggaggctttgcaggctgcctgcgtccctgtgatgctcagcaatggatgggagttgccgttctctgaagtgattaattggaaccaagctgccgtcataggcgatgagagattgttattacagattccttctacaatcaggtctattcatcaggataaaatcctagcacttagacagcagacacaattcttgtgggaggcttatttttcttcagttgagaagattgtattaactacactagagattattcaggacagaatattcaagcacatatcacgtaacagtttaatatggaacaaacatcctggaggattgttcgtactaccacagtattcatcttatctgggagattttccttactactatgctaatttaggtttaaagcccccctccaaattcactgcagtcatccatgcggtgaccccgctggtctctcagtctcagccagtgttgaagcttcttgtggctgcagccaagtcccagtactgtgcccagatcatagttctatggaattgtgacaagcccctaccagccaaacaccgctggcctgccactgctgtgcctgtcatcgtcattgaaggagagagcaaggttatgagcagccgttttctaccctacgacaacatcatcacagacgccgtgctcagccttgatgaggacaccgtgctttcaacaacagaggtggattttgccttcacagtgtggcagagcttccccgagaggattgtggggtaccccgcacgtagccacttctgggataactctaaggagcggtggggatacacgtcaaagtggacgaacgactactccatggtgttgacaggagctgctatttaccacaaatattatcactacctgtactcccattacctgccagccagcctgaagaacatggtggaccaattggccaattgtgaggacattctcatgaacttcctggtgtctgctgtgacaaaattgcctccaatcaaagtgacccagaagaagcagtataaggagacaatgatgggacagacttctcgggcttcccgttgggctgaccctgaccactttgcccagcgacagagctgcatgaatacgtttgccagctggtttggctacatgccgctgatccactctcagatgaggctcgaccccgtcctctttaaagaccaggtctctattttgaggaagaaataccgagacattgagcgactttgaggaatccggccaagtgggggaggggaagcgagaagggacgggggtcaagctgctttctcttcccagtgcagatccactcatcagcagagccagattgtgccaactatccaaaaacttagatgagccgaacgacaaaaaaaaaaa

SEQ ID NO: 8 - DNA, 2975 bp, Macaca mulatta
  misc_feature 1..2975: note = Reverse Complement of SEQ ID NO:7
  source 1..2975: mol_type = genomic DNA
tttttttttttgtcgttcggctcatctaagtttttggatagttggcacaatctggctctgctgatgagtggatctgcactgggaagagaaagcagcttgacccccgtcccttctcgcttcccctcccccacttggccggattcctcaaagtcgctcaatgtctcggtatttcttcctcaaaatagagacctggtctttaaagaggacggggtcgagcctcatctgagagtggatcagcggcatgtagccaaaccagctggcaaacgtattcatgcagctctgtcgctgggcaaagtggtcagggtcagcccaacgggaagcccgagaagtctgtcccatcattgtctccttatactgcttcttctgggtcactttgattggaggcaattttgtcacagcagacaccaggaagttcatgagaatgtcctcacaattggccaattggtccaccatgttcttcaggctggctggcaggtaatgggagtacaggtagtgataatatttgtggtaaatagcagctcctgtcaacaccatggagtagtcgttcgtccactttgacgtgtatccccaccgctccttagagttatcccagaagtggctacgtgcggggtaccccacaatcctctcggggaagctctgccacactgtgaaggcaaaatccacctctgttgttgaaagcacggtgtcctcatcaaggctgagcacggcgtctgtgatgatgttgtcgtagggtagaaaacggctgctcataaccttgctctctccttcaatgacgatgacaggcacagcagtggcaggccagcggtgtttggctggtaggggcttgtcacaattccatagaactatgatctgggcacagtactgggacttggctgcagccacaagaagcttcaacactggctgagactgagagaccagcggggtcaccgcatggatgactgcagtgaatttggaggggggctttaaacctaaattagcatagtagtaaggaaaatctcccagataagatgaatactgtggtagtacgaacaatcctccaggatgtttgttccatattaaactgttacgtgatatgtgcttgaatattctgtcctgaataatctctagtgtagttaatacaatcttctcaactgaagaaaaataagcctcccacaagaattgtgtctgctgtctaagtgctaggattttatcctgatgaatagacctgattgtagaaggaatctgtaataacaatctctcatcgcctatgacggcagcttggttccaattaatcacttcagagaacggcaactcccatccattgctgagcatcacagggacgcaggcagcctgcaaagcctccaggaatctgaaggacccaagcctgcgaccacgaggaaccagacagaaagtggcattgtgcagcatttcccgataatcatacttctcatactcggtgttgtctctgtcacagcgagaatccttgtgcttttgccagtctttgccatgcttgcaggtggtgaggagcacaacgtcctccccgttatggacgtgatataaggcattcctggtgtctgaccctatccctgtcaggtacctcttccccttgaataccagcatgtacttcctgagaggagggatggtgttgaacttcaaaaaccccctctcccctcctgtcctgggatgatccttagaaaataggggaatagaaacatcaaagttgggtcggaagttttcagtactgatgctggctttggccagcatcgcctggccgatgtcaaaccccacgtcctcggtgtagtcaggccaagtgccggaatataaattaaaaattaaatgattcctaccattgttccacaagtggagactctgcactttggatctcaaattgtgcacatactgaggtgacaactggtctctgtctaaagtatccagactcaggacaaagaggcacgcctggctggggtccgaggtatagaacctggagccctcgatggccgctagaatgttttggtaactttcggcgattttctcccctttttgctgcgggtatacgtagactttgaagccgtttttcttgcaaagggtgaaatcgaagcaggactccatgcggcacttcttgcctttgtagatgctcgagttggcatctcgcttctgccggggggaaatgtgcacgctagaatcctcgttttccaattgatcccaaggaacgaaggggcgcagagcgtccgggaagcggggccagaaatgatccggactggggtggtgcaagccattccgaccgctgtgctcttctctccggctgtggctcctcgatgccctaaactgcaagcctccgaaataaaacaaaagggcgagacaagagccagctgagagcaggatgaaatagcgttttttggcctgcatgtgtcctgcctgggtcaagaggattgtaaataaacacaagaatcacccaagtttcccaatcaacactttcagctccagtccgccatcttcccgcctgtaaagacttcaaactctccgctcccaccttctctggatgcctttccccaagccgtggactgatccagcgcatgtgggcgatttctttaactttctccccttcggtctttcatctttgggttgcacaatgcacgggagagagcggggctgaatatctcgcacccagggcgggcgagcagcggactgtaattttcttgcatgcaacaagacggaggaaaagaaagagagaggggagaaaaaaaaaagctcccgatacccaatcaatggcaagacgaagtgattgccttgcctctcggattcctctcggcagcgtggaaaatgagccccgggaaggcaacttcaactcatccaccactctccgtgcagagcactccggttccaacaagtcagccgatcccgggttcagccggctagtgcatcttgcagctggggcgccgtaacctcacaaatccctgcatctctctttattcccttctgcagcggctccaagactc

SEQ ID NO: 9 - DNA, 3235 bp, Macaca fascicularis
  misc_feature 1..3235: note = >XM_005563971.2 PREDICTED: Macaca fascicularis exostosin glycosyltransferase 1 (EXT1), mRNA
  source 1..3235: mol_type = genomic DNA
cgcgcgtcccgggggccggccccgcgagcgcaggagtaaacaccgccggagtcttggagccgctgcagaagggaataaagagagatgcagggatttgtgaggttacggcgccccagctgcaagatgcactagccggctgaacccgggatcggctgacttgttggaaccggagtgctctgcacggagagtggtggatgagttgaagttgccttcccggggctcattttccacgctgccgagaggaatccgagaggcaaggcaatcacttcgtcttgccattgattgggtatcgggagcttttttttttctcccctctctctttcttttcctccgtcttgttgcatgcaagaaaattacagtccgctgctcgcccgccctgggtgcgagatattcagccccgctctctcccgtgcattgtgcaacccaaagatgaaagaccgaaggggagaaagttaaagaaatcgcccacatgcgctggatcagtccacggcttggggaaaggcatccagagaaggtgggagcggagagtttgaagtctttacaggcgggaagatggcggactggagctgaaagtgttgattgggaaacttgggtgattcttgtgtttatttacaatcctcttgacccaggcaggacacatgcaggccaaaaaacgctatttcatcctgctctcagctggctcttgtctcgcccttttgttttatttcggaggcttgcagttcagggcatcgaggagccacagccggagagaagagcacagcggtcggaatggcttgcaccaccccagtccggatcatttctggccccgcttcccggacgctctgcgccccttcgttccttgggatcaattggaaaacgaggattctagcgtgcacatttccccccggcagaagcgagatgccaactcgagcatctacaaaggcaagaagtgccgcatggagtcctgcttcgatttcaccctttgcaagaaaaacggcttcaaagtctacgtatacccgcagcaaaaaggggagaaaatcgccgaaagttaccaaaacattctagcggccatcgagggctccaggttctacacctcggaccccagccaggcgtgcctctttgtcctgagtctggatactttagacagagaccagttgtcacctcagtatgtgcacaatttgagatccaaagtgcagagtctccacttgtggaacaatggtaggaatcatttaatttttaatttatattccggcacttggcctgactacaccgaggacgtggggtttgacatcggccaggcgatgctggccaaagccagcatcagtactgaaaacttccgacccaactttgatgtttctattcccctattttctaaggatcatcccaggacaggaggggagagggggtttttgaagttcaacaccatccctcctctcaggaagtacatgctggtattcaaggggaagaggtacctgacagggatagggtcagacaccaggaatgccttatatcacgtccataacggggaggacgttgtgctcctcaccacctgcaagcatggcaaagactggcaaaagcacaaggattctcgctgtgacagagacaacaccgagtatgagaagtatgattatcgggaaatgctgcacaatgccactttctgtctggttcctcgtggtcgcaggcttgggtccttcagattcctggaggctttgcaggctgcctgcgtccctgtgatgctcagcaatggatgggagttgccgttctctgaagtgattaattggaaccaagctgccgtcataggcgatgagagattgttattacagattccttctacaatcaggtctattcatcaggataaaatcctagcacttagacagcagacacaattcttgtgggaggcttatttttcttcagttgagaagattgtattaactacactagagattattcaggacagaatattcaagcacatatcacgtaacagtttaatatggaacaaacatcctggaggattgttcgtactaccacagtattcatcttatctgggagattttccttactactatgctaatttaggtttaaagcccccctccaaattcactgcagtcatccatgcggtgaccccgctggtctctcagtctcagccagtgttgaagcttcttgtggctgcagccaagtcccagtactgtgcccagatcatagttctatggaattgtgacaagcccctaccagccaaacaccgctggcctgccactgctgtgcctgtcatcgtcattgaaggagagagcaaggttatgagcagccgttttctaccctacgacaacatcatcacagacgccgtgctcagccttgatgaggacaccgtgctttcaacaacagaggtggattttgccttcacagtgtggcagagcttccccgagaggattgtggggtaccccgcacgtagccacttctgggataactctaaggagcggtggggatacacgtcaaagtggacgaacgactactccatggtgttgacaggagctgctatttaccacaaatattatcactacctgtactcccattacctgccagccagcctgaagaacatggtggaccaattggccaattgtgaggacattctcatgaacttcctggtgtctgctgtgacaaaattgcctccaatcaaagtgacccagaagaagcagtataaggagacaatgatgggacagacttctcgggcttcccgttgggctgaccctgaccactttgcccagcgacagagctgcatgaatacgtttgccagctggtttggctacatgccgctgatccactctcagatgaggctcgaccccgtcctctttaaagaccaggtctctattttgaggaagaaataccgagacattgagcgactttgaggaatccggccaagtgggggaggggaagcgagaagggacgggggtcaagctgctttctcttcccagtgcagatccactcatcagcagagccagattgtgccaactatccaaaaacttagatgagccgaacgacaaaaaaaaaaaaaaaaaaggccaatgagaactcgactcctggctcctgggactgcaccggactgctccaaactcacctcactggcttctgtgtcccaagactaggttgtgtacagtttaattatggaacattaaataattatttttgaaatgattgctatgcaggtttaaacttttttaatgatcaaaactattaaaaaccagagttctttgtttaatcaaaa

SEQ ID NO: 10 - DNA, 3235 bp, Macaca fascicularis
  misc_feature 1..3235: note = Reverse Complement of SEQ ID NO:9
  source 1..3235: mol_type = genomic DNA
ttttgattaaacaaagaactctggtttttaatagttttgatcattaaaaaagtttaaacctgcatagcaatcatttcaaaaataattatttaatgttccataattaaactgtacacaacctagtcttgggacacagaagccagtgaggtgagtttggagcagtccggtgcagtcccaggagccaggagtcgagttctcattggccttttttttttttttttttgtcgttcggctcatctaagtttttggatagttggcacaatctggctctgctgatgagtggatctgcactgggaagagaaagcagcttgacccccgtcccttctcgcttcccctcccccacttggccggattcctcaaagtcgctcaatgtctcggtatttcttcctcaaaatagagacctggtctttaaagaggacggggtcgagcctcatctgagagtggatcagcggcatgtagccaaaccagctggcaaacgtattcatgcagctctgtcgctgggcaaagtggtcagggtcagcccaacgggaagcccgagaagtctgtcccatcattgtctccttatactgcttcttctgggtcactttgattggaggcaattttgtcacagcagacaccaggaagttcatgagaatgtcctcacaattggccaattggtccaccatgttcttcaggctggctggcaggtaatgggagtacaggtagtgataatatttgtggtaaatagcagctcctgtcaacaccatggagtagtcgttcgtccactttgacgtgtatccccaccgctccttagagttatcccagaagtggctacgtgcggggtaccccacaatcctctcggggaagctctgccacactgtgaaggcaaaatccacctctgttgttgaaagcacggtgtcctcatcaaggctgagcacggcgtctgtgatgatgttgtcgtagggtagaaaacggctgctcataaccttgctctctccttcaatgacgatgacaggcacagcagtggcaggccagcggtgtttggctggtaggggcttgtcacaattccatagaactatgatctgggcacagtactgggacttggctgcagccacaagaagcttcaacactggctgagactgagagaccagcggggtcaccgcatggatgactgcagtgaatttggaggggggctttaaacctaaattagcatagtagtaaggaaaatctcccagataagatgaatactgtggtagtacgaacaatcctccaggatgtttgttccatattaaactgttacgtgatatgtgcttgaatattctgtcctgaataatctctagtgtagttaatacaatcttctcaactgaagaaaaataagcctcccacaagaattgtgtctgctgtctaagtgctaggattttatcctgatgaatagacctgattgtagaaggaatctgtaataacaatctctcatcgcctatgacggcagcttggttccaattaatcacttcagagaacggcaactcccatccattgctgagcatcacagggacgcaggcagcctgcaaagcctccaggaatctgaaggacccaagcctgcgaccacgaggaaccagacagaaagtggcattgtgcagcatttcccgataatcatacttctcatactcggtgttgtctctgtcacagcgagaatccttgtgcttttgccagtctttgccatgcttgcaggtggtgaggagcacaacgtcctccccgttatggacgtgatataaggcattcctggtgtctgaccctatccctgtcaggtacctcttccccttgaataccagcatgtacttcctgagaggagggatggtgttgaacttcaaaaaccccctctcccctcctgtcctgggatgatccttagaaaataggggaatagaaacatcaaagttgggtcggaagttttcagtactgatgctggctttggccagcatcgcctggccgatgtcaaaccccacgtcctcggtgtagtcaggccaagtgccggaatataaattaaaaattaaatgattcctaccattgttccacaagtggagactctgcactttggatctcaaattgtgcacatactgaggtgacaactggtctctgtctaaagtatccagactcaggacaaagaggcacgcctggctggggtccgaggtgtagaacctggagccctcgatggccgctagaatgttttggtaactttcggcgattttctcccctttttgctgcgggtatacgtagactttgaagccgtttttcttgcaaagggtgaaatcgaagcaggactccatgcggcacttcttgcctttgtagatgctcgagttggcatctcgcttctgccggggggaaatgtgcacgctagaatcctcgttttccaattgatcccaaggaacgaaggggcgcagagcgtccgggaagcggggccagaaatgatccggactggggtggtgcaagccattccgaccgctgtgctcttctctccggctgtggctcctcgatgccctgaactgcaagcctccgaaataaaacaaaagggcgagacaagagccagctgagagcaggatgaaatagcgttttttggcctgcatgtgtcctgcctgggtcaagaggattgtaaataaacacaagaatcacccaagtttcccaatcaacactttcagctccagtccgccatcttcccgcctgtaaagacttcaaactctccgctcccaccttctctggatgcctttccccaagccgtggactgatccagcgcatgtgggcgatttctttaactttctccccttcggtctttcatctttgggttgcacaatgcacgggagagagcggggctgaatatctcgcacccagggcgggcgagcagcggactgtaattttcttgcatgcaacaagacggaggaaaagaaagagagaggggagaaaaaaaaaagctcccgatacccaatcaatggcaagacgaagtgattgccttgcctctcggattcctctcggcagcgtggaaaatgagccccgggaaggcaacttcaactcatccaccactctccgtgcagagcactccggttccaacaagtcagccgatcccgggttcagccggctagtgcatcttgcagctggggcgccgtaacctcacaaatccctgcatctctctttattcccttctgcagcggctccaagactccggcggtgtttactcctgcgctcgcggggccggcccccgggacgcgcg

SEQ ID NO: 11 - DNA, 3469 bp, Homo sapiens
  misc_feature 1..3469: note = >NM_000401.3 Homo sapiens exostosin glycosyltransferase 2 (EXT2), transcript variant 1, mRNA
  source 1..3469: mol_type = genomic DNA
tcccttcctgctgccaccttcccgccagccacagggatctgattcctcccagggggatgtcctgcgcctcagggtccggtggtggcctgcggcatcccttgcggtgccagaagccgtgggacgaggagtgtgaggaagaggctgtctgtgtcattatgtgtgcgtcggtcaagtataatatccggggtcctgccctcatcccaagaatgaagaccaagcaccgaatctactatatcaccctcttctccattgtcctcctgggcctcattgccactggcatgtttcagttttggccccattctatcgagtcctcaaatgactggaatgtagagaagcgcagcatccgtgatgtgccggttgttaggctgccagccgacagtcccatcccagagcggggggatctcagttgcagaatgcacacgtgttttgatgtctatcgctgtggcttcaacccaaagaacaaaatcaaggtgtatatctatgctctgaaaaagtacgtggatgactttggcgtctctgtcagcaacaccatctcccgggagtataatgaactgctcatggccatctcagacagtgactactacactgatgacatcaaccgggcctgtctgtttgttccctccatcgatgtgcttaaccagaacacactgcgcatcaaggagacagcacaagcgatggcccagctctctaggtgggatcgaggtacgaatcacctgttgttcaacatgttgcctggaggtcccccagattataacacagccctggatgtccccagagacagggccctgttggctggtggcggcttttctacgtggacttaccggcaaggctacgatgtcagcattcctgtctatagtccactgtcagctgaggtggatcttccagagaaaggaccaggtccacggcaatacttcctcctgtcatctcaggtgggtctccatcctgagtacagagaggacctagaagccctccaggtcaaacatggagagtcagtgttagtactcgataaatgcaccaacctctcagagggtgtcctttctgtccgtaagcgctgccacaagcaccaggtcttcgattacccacaggtgctacaggaggctactttctgtgtggttcttcgtggagctcggctgggccaggcagtattgagcgatgtgttacaagctggctgtgtcccggttgtcattgcagactcctatattttgcctttctctgaagttcttgactggaagagagcatctgtggttgtaccagaagaaaagatgtcagatgtgtacagtattttgcagagcatcccccaaagacagattgaagaaatgcagagacaggcccggtggttctgggaagcgtacttccagtcaattaaagccattgccctggccaccctgcagattatcaatgaccggatctatccatatgctgccatctcctatgaagaatggaatgaccctcctgctgtgaagtggggcagcgtgagcaatccactcttcctcccgctgatcccaccacagtctcaagggttcaccgccatagtcctcacctacgaccgagtagagagcctcttccgggtcatcactgaagtgtccaaggtgcccagtctatccaaactacttgtcgtctggaataatcagaataaaaaccctccagaagattctctctggcccaaaatccgggttccattaaaagttgtgaggactgctgaaaacaagttaagtaaccgtttcttcccttatgatgaaatcgagacagaagctgttctggccattgatgatgatatcattatgctgacctctgacgagctgcaatttggttatgaggtctggcgggaatttcctgaccggttggtgggttacccgggtcgtctgcatctctgggaccatgagatgaataagtggaagtatgagtctgagtggacgaatgaagtgtccatggtgctcactggggcagctttttatcacaagtattttaattacctgtatacctacaaaatgcctggggatatcaagaactgggtagatgctcatatgaactgtgaagatattgccatgaacttcctggtggccaacgtcacgggaaaagcagttatcaaggtaaccccacgaaagaaattcaagtgtcctgagtgcacagccatagatgggctttcactagaccaaacacacatggtggagaggtcagagtgcatcaacaagtttgcttcagtcttcgggaccatgcctctcaaggtggtggaacaccgagctgaccctgtcctgtacaaagatgactttcctgagaagctgaagagcttccccaacattggcagcttatgaaacgtgtcattggtggaggtctgaatgtgaggctgggacagagggagagaacaaggcctcccagcactctgatgtcagagtagtaggttaagggtggaaggttgacctacttggatcttggcatgcacccacctaacccactttctcaagaacaagaacctagaatgaatatccaagcacctcgagctatgcaacctctgttcttgtatttcttatgatctctgatgggttcttctcgaaaatgccaagtggaagactttgtggcatgctccagatttaaatccagctgaggctccctttgttttcagttccatgtaacaatctggaaggaaacttcacggacaggaagactgctggagaagagaagcgtgttagcccatttgaggtctggggaatcatgtaaagggtacccagacctcacttttagttatttacatcaatgagttctttcagggaaccaaacccagaattcggtgcaaaagccaaacatcttggtgggatttgataaatgccttgggacctggagtgctgggcttgtgcacaggaagagcaccagccgctgagtcaggatcctgtcagttccatgagctattcctctttggtttggctttttgatatgattaaaattattttttattcctttttctactgtgtcttaaacaccaattcctgatagtccaaggaaccacctttctcccttgatatatttaactccgtctttggcctgacaacagtcttctgcccatgtctgggaacacacgccaggaggaatgtctgataccctctgcatcaagcgtaagaaggtcccaaatcataaccattttaagaacagatgactcagaaacctccagaggaatctgtttgcttcctgattagatccagtcaatgttttaaaggtattgtcagagaaaaacagagggtctgtactagccatgcaaggagtcgctctagctggtacccgtaaaagttgtgggaattgtgacccccatcccaaggggatgccaaaatttctctcattcttttggtataaacttaacattagccagggaggttctggctaacgttaaatgctgctatacaactgctttgcaacagttgctggtatatttaaatcattaaatttcagcatttactaatactgcaaaaaaaaaaaaaaa

SEQ ID NO: 12 - DNA, 3469 bp, Homo sapiens
  misc_feature 1..3469: note = Reverse Complement of SEQ ID NO:11
  source 1..3469: mol_type = genomic DNA
tttttttttttttttgcagtattagtaaatgctgaaatttaatgatttaaatataccagcaactgttgcaaagcagttgtatagcagcatttaacgttagccagaacctccctggctaatgttaagtttataccaaaagaatgagagaaattttggcatccccttgggatgggggtcacaattcccacaacttttacgggtaccagctagagcgactccttgcatggctagtacagaccctctgtttttctctgacaatacctttaaaacattgactggatctaatcaggaagcaaacagattcctctggaggtttctgagtcatctgttcttaaaatggttatgatttgggaccttcttacgcttgatgcagagggtatcagacattcctcctggcgtgtgttcccagacatgggcagaagactgttgtcaggccaaagacggagttaaatatatcaagggagaaaggtggttccttggactatcaggaattggtgtttaagacacagtagaaaaaggaataaaaaataattttaatcatatcaaaaagccaaaccaaagaggaatagctcatggaactgacaggatcctgactcagcggctggtgctcttcctgtgcacaagcccagcactccaggtcccaaggcatttatcaaatcccaccaagatgtttggcttttgcaccgaattctgggtttggttccctgaaagaactcattgatgtaaataactaaaagtgaggtctgggtaccctttacatgattccccagacctcaaatgggctaacacgcttctcttctccagcagtcttcctgtccgtgaagtttccttccagattgttacatggaactgaaaacaaagggagcctcagctggatttaaatctggagcatgccacaaagtcttccacttggcattttcgagaagaacccatcagagatcataagaaatacaagaacagaggttgcatagctcgaggtgcttggatattcattctaggttcttgttcttgagaaagtgggttaggtgggtgcatgccaagatccaagtaggtcaaccttccacccttaacctactactctgacatcagagtgctgggaggccttgttctctccctctgtcccagcctcacattcagacctccaccaatgacacgtttcataagctgccaatgttggggaagctcttcagcttctcaggaaagtcatctttgtacaggacagggtcagctcggtgttccaccaccttgagaggcatggtcccgaagactgaagcaaacttgttgatgcactctgacctctccaccatgtgtgtttggtctagtgaaagcccatctatggctgtgcactcaggacacttgaatttctttcgtggggttaccttgataactgcttttcccgtgacgttggccaccaggaagttcatggcaatatcttcacagttcatatgagcatctacccagttcttgatatccccaggcattttgtaggtatacaggtaattaaaatacttgtgataaaaagctgccccagtgagcaccatggacacttcattcgtccactcagactcatacttccacttattcatctcatggtcccagagatgcagacgacccgggtaacccaccaaccggtcaggaaattcccgccagacctcataaccaaattgcagctcgtcagaggtcagcataatgatatcatcatcaatggccagaacagcttctgtctcgatttcatcataagggaagaaacggttacttaacttgttttcagcagtcctcacaacttttaatggaacccggattttgggccagagagaatcttctggagggtttttattctgattattccagacgacaagtagtttggatagactgggcaccttggacacttcagtgatgacccggaagaggctctctactcggtcgtaggtgaggactatggcggtgaacccttgagactgtggtgggatcagcgggaggaagagtggattgctcacgctgccccacttcacagcaggagggtcattccattcttcataggagatggcagcatatggatagatccggtcattgataatctgcagggtggccagggcaatggctttaattgactggaagtacgcttcccagaaccaccgggcctgtctctgcatttcttcaatctgtctttgggggatgctctgcaaaatactgtacacatctgacatcttttcttctggtacaaccacagatgctctcttccagtcaagaacttcagagaaaggcaaaatataggagtctgcaatgacaaccgggacacagccagcttgtaacacatcgctcaatactgcctggcccagccgagctccacgaagaaccacacagaaagtagcctcctgtagcacctgtgggtaatcgaagacctggtgcttgtggcagcgcttacggacagaaaggacaccctctgagaggttggtgcatttatcgagtactaacactgactctccatgtttgacctggagggcttctaggtcctctctgtactcaggatggagacccacctgagatgacaggaggaagtattgccgtggacctggtcctttctctggaagatccacctcagctgacagtggactatagacaggaatgctgacatcgtagccttgccggtaagtccacgtagaaaagccgccaccagccaacagggccctgtctctggggacatccagggctgtgttataatctgggggacctccaggcaacatgttgaacaacaggtgattcgtacctcgatcccacctagagagctgggccatcgcttgtgctgtctccttgatgcgcagtgtgttctggttaagcacatcgatggagggaacaaacagacaggcccggttgatgtcatcagtgtagtagtcactgtctgagatggccatgagcagttcattatactcccgggagatggtgttgctgacagagacgccaaagtcatccacgtactttttcagagcatagatatacaccttgattttgttctttgggttgaagccacagcgatagacatcaaaacacgtgtgcattctgcaactgagatccccccgctctgggatgggactgtcggctggcagcctaacaaccggcacatcacggatgctgcgcttctctacattccagtcatttgaggactcgatagaatggggccaaaactgaaacatgccagtggcaatgaggcccaggaggacaatggagaagagggtgatatagtagattcggtgcttggtcttcattcttgggatgagggcaggaccccggatattatacttgaccgacgcacacataatgacacagacagcctcttcctcacactcctcgtcccacggcttctggcaccgcaagggatgccgcaggccaccaccggaccctgaggcgcaggacatccccctgggaggaatcagatccctgtggctggcgggaaggtggcagcaggaaggga

SEQ ID NO: 13 - DNA, 10037 bp, Homo sapiens
  misc_feature 1..10037: note = >NM_207122.2 Homo sapiens exostosin glycosyltransferase 2 (EXT2), transcript variant 2, mRNA
  source 1..10037: mol_type = genomic DNA
agacggcccggatcccggttaccggcccctcgctcgctgctcgccagcccagactcggccctggcagtggcggctggcgattcggaccgatccgacctgggcggaggtggcccgcgccccgcggcatgagccggtgaccaagctcggggccgagcgggaggcagccgtggccgaggagtgtgaggaagaggctgtctgtgtcattatgtgtgcgtcggtcaagtataatatccggggtcctgccctcatcccaagaatgaagaccaagcaccgaatctactatatcaccctcttctccattgtcctcctgggcctcattgccactggcatgtttcagttttggccccattctatcgagtcctcaaatgactggaatgtagagaagcgcagcatccgtgatgtgccggttgttaggctgccagccgacagtcccatcccagagcggggggatctcagttgcagaatgcacacgtgttttgatgtctatcgctgtggcttcaacccaaagaacaaaatcaaggtgtatatctatgctctgaaaaagtacgtggatgactttggcgtctctgtcagcaacaccatctcccgggagtataatgaactgctcatggccatctcagacagtgactactacactgatgacatcaaccgggcctgtctgtttgttccctccatcgatgtgcttaaccagaacacactgcgcatcaaggagacagcacaagcgatggcccagctctctaggtgggatcgaggtacgaatcacctgttgttcaacatgttgcctggaggtcccccagattataacacagccctggatgtccccagagacagggccctgttggctggtggcggcttttctacgtggacttaccggcaaggctacgatgtcagcattcctgtctatagtccactgtcagctgaggtggatcttccagagaaaggaccaggtccacggcaatacttcctcctgtcatctcaggtgggtctccatcctgagtacagagaggacctagaagccctccaggtcaaacatggagagtcagtgttagtactcgataaatgcaccaacctctcagagggtgtcctttctgtccgtaagcgctgccacaagcaccaggtcttcgattacccacaggtgctacaggaggctactttctgtgtggttcttcgtggagctcggctgggccaggcagtattgagcgatgtgttacaagctggctgtgtcccggttgtcattgcagactcctatattttgcctttctctgaagttcttgactggaagagagcatctgtggttgtaccagaagaaaagatgtcagatgtgtacagtattttgcagagcatcccccaaagacagattgaagaaatgcagagacaggcccggtggttctgggaagcgtacttccagtcaattaaagccattgccctggccaccctgcagattatcaatgaccggatctatccatatgctgccatctcctatgaagaatggaatgaccctcctgctgtgaagtggggcagcgtgagcaatccactcttcctcccgctgatcccaccacagtctcaagggttcaccgccatagtcctcacctacgaccgagtagagagcctcttccgggtcatcactgaagtgtccaaggtgcccagtctatccaaactacttgtcgtctggaataatcagaataaaaaccctccagaagattctctctggcccaaaatccgggttccattaaaagttgtgaggactgctgaaaacaagttaagtaaccgtttcttcccttatgatgaaatcgagacagaagctgttctggccattgatgatgatatcattatgctgacctctgacgagctgcaatttggttatgaggtctggcgggaatttcctgaccggttggtgggttacccgggtcgtctgcatctctgggaccatgagatgaataagtggaagtatgagtctgagtggacgaatgaagtgtccatggtgctcactggggcagctttttatcacaagtattttaattacctgtatacctacaaaatgcctggggatatcaagaactgggtagatgctcatatgaactgtgaagatattgccatgaacttcctggtggccaacgtcacgggaaaagcagttatcaaggtaaccccacgaaagaaattcaagtgtcctgagtgcacagccatagatgggctttcactagaccaaacacacatggtggagaggtcagagtgcatcaacaagtttgcttcagtcttcgggaccatgcctctcaaggtggtggaacaccgagctgaccctgtcctgtacaaagatgactttcctgagaagctgaagagcttccccaacattggcagcttatgaaacgtgtcattggtggaggtctgaatgtgaggctgggacagagggagagaacaaggcctcccagcactctgatgtcagagtagtaggttaagggtggaaggttgacctacttggatcttggcatgcacccacctaacccactttctcaagaacaagaacctagaatgaatatccaagcacctcgagctatgcaacctctgttcttgtatttcttatgatctctgatgggttcttctcgaaaatgccaagtggaagactttgtggcatgctccagatttaaatccagctgaggctccctttgttttcagttccatgtaacaatctggaaggaaacttcacggacaggaagactgctggagaagagaagcgtgttagcccatttgaggtctggggaatcatgtaaagggtacccagacctcacttttagttatttacatcaatgagttctttcagggaaccaaacccagaattcggtgcaaaagccaaacatcttggtgggatttgataaatgccttgggacctggagtgctgggcttgtgcacaggaagagcaccagccgctgagtcaggatcctgtcagttccatgagctattcctctttggtttggctttttgatatgattaaaattattttttattcctttttctactgtgtcttaaacaccaattcctgatagtccaaggaaccacctttctcccttgatatatttaactccgtctttggcctgacaacagtcttctgcccatgtctgggaacacacgccaggaggaatgtctgataccctctgcatcaagcgtaagaaggtcccaaatcataaccattttaagaacagatgactcagaaacctccagaggaatctgtttgcttcctgattagatccagtcaatgttttaaaggtattgtcagagaaaaacagagggtctgtactagccatgcaaggagtcgctctagctggtacccgtaaaagttgtgggaattgtgacccccatcccaaggggatgccaaaatttctctcattcttttggtataaacttaacattagccagggaggttctggctaacgttaaatgctgctatacaactgctttgcaacagttgctggtatatttaaatcattaaatttcagcatttactaatactgcacatgtgtgaattatacctctttaagcccagttgatgaacaaatctaccctggcgaatgttaaatgttatggattcgaaacagatttatctggctctgatattaagattagccacagtttgggctttagccacaacatatgtccccaaaacacaaaatacataacaatttgcttagaatatggatataattacagaaacctagttgttttgccagtcagcgtcagtcatacaccatccattgttctgttgagtgacatgaaggtgggcagttattatgctgtagtttcatcaagagtcacttcagatgtgttccccagactttgagaggtcaaagaaagtttcagaagtagcaaagttggaagtggaaatcataagagttttgtcttctttcatttgaataagtgatcgaatcatggactattattgccaaagggggcaagcgatcatctcatccagtttgttcattttgcaaatgcagaaactgaagctgcagatgttcattttgcaaatgcagaaactgaagtgatttttttcagtttctgacagcagcaaacacaggtgcttaccaaatacttttgatttgggtaatgtgtactggtcagtaggagacatgggaaagcattttggtctcatgtattcataatattggggacgatatggtagaaagccaggaaaaatatttctgttgtcacccaggtaccagaggctgacaagcacagtgaggacctctaatctttctaggggttttctagtttgttttccaagatgtggggcaggtataggggagggtcttacattgaaatctctgctgaaagctatggactgtgctggcattgtgtatgtgtcatattgccctggtttcttcaaatttctgcccttttgctcatcatcgaatgcactaccttagtggctggtttctaatgcagcttctctcccaaagggtacatttttaaatttttattttttaaaatcttgagagtcctttgatttgggaagaggaactctttcatctgagttcattgtgagccctagagagctgtgtgactttatcatcgtcataggagtcattggactttaaaggcattacaactccatttaaagtacctcattactcccaggaatattgggtgttagatcttgcaacacagcataaaacaatttatgttaaagaaggagcattatatcctaggcacttgaaacaacctcaaaggtgatgttaccctatgaacagataggtggtacagtcaccgtagaaattcaagacagggatatagcaggtgatggcgattcatggattcagagtgggctagggactccactttattgttcgtgtatttctgagctgctaaccagcaaacctcacccataagcttaggtcaggatcatctgtcctcgggatgccatagagcctggtttcagaagcagaacaatcatgctaattaaaatgtcgtgttctggcctacagcagacaacagctggttttagattaagaaatctttttaaagaaacacatcttactggcctatagagaagacgaacttgaactggccctggcccaagtgcacactgagccactggctttgcccccaggggcctaactgggatgggcctgcttggaatgccagggctggaaatacttttttattttgctgattaacattacatagttgttaaaatgtttatctcatgtattttaccaaccctcacacatttaggtataaacctccttttctgggagaattaaagagaaaaacagcaactttagttgtcagaatcttgtgttctttcctgccagtgatgctctgctgtatccttttttttttttttttttttgagacagagtcttgctcttgtcacccaggctggagtgcaacaatagcatggtctcggctcactacatcctccgcctcccaggttcaagtgattctcctgcctcagcctcctgagtagctgggattacaggcgcttgccaccacgcctggctaatttgtttgtaattttagtagaggcagggtttcaccacgttagccaggctggtctcgaactcctgacctcaggtgatctgcacgccttgacctcccaaagtgctgggattacgggcgtgagtccccacgctcagccactgtatcctttactcagtgtcatcaagttcaaagctctgaccaccctggtttctctgccaaagcctcatctacttccagctgggctttgaacttgtggtttttaagtgctggtttctctgctgcctttggaaaatagtgaccatcatgctggtctgtgctgacgcagactgggagctggaagagacaagctccctctttgctctcattggccaaagatgttgctaataaccctgtgatcctagcttccttctaggatgatagcctctgacaggcaccatgccaggaggaaactagagcgtctttatcactgaaagatagcacgtttctagccacaggttctgaagttgatttgaggttaaaatccaagaacctttgatagttttcagccaagatagtaatcagaaagtagatgaagcagagactgggtttgggaagtggttgggttctgggaaggctcttcctagctctgcagttagatcctgtgaggacccagctgatagagtaaaggctttgggtgttggagacttcccatcagccacccatcatgagcctggtgtgtttcctttgctttgtagctcctttgggggtatgctgctttttccatttctcttggctcgggtactcttccattgcagcaagagaagccacagtgggctgttccccaagcagccctggcacagagaggcagagtagagaatgctaaactggccccatgtctcctccagccacttcctgaggagcagttctggcaggagtgttaaccatattggcagcagcttccatccagagagactttgaaagcaacttgagctttccactgcagggcctggaggcatatgaaacctgtggggcctgcccctactcacctcacccctgagctctgtccaagccctggacctcctgtcctcggcctgtgtttggtactcacccactttctacttctgagtagaatcaagggcagcatttggtcccattataccagccatgcatcatctgtgaacaggccttattgagcttatcttggcagaggaaagtcaggcaggcaagacccactctaaattttaatgtttccccctcattttagggtgggagctgtgagttcatctgaagactgggtgagggcattgtaagctcaagccacagcctcttttccacctccattaaatggactgttagggatgcccagcttccccaatttcctgggagggtgtgtgggtctgtacaggcaaccttgtgtcattctttcaatttccggctcaccattgctggcaacagtgggaagatgaccagagaaagtttggccccctctcccaagcttccaggcctctttccttttcaagaaatagttgagtcaccagcatctgtatctggcattttgtttcttcacatttgcaaccatttcagggtagagtttttttgtttgtttgtttgtttgtttttgttttttttgttttttctttggaaacagagtctcactctgtcccataggctggagtgtagtgctgtgatcatggctcgctgcagcctcaaactcctggactcaagcagtcttcccatctcagccttccaagtagctgagactaaaagcgtgcaccaccacacctggctgatcttttaatttttttggagagacagggcctcactatgttgcctaggctggtctctaactcctgggatcaagtgatcctcctgcctcagcgtcccaaagtgttgggattacaggtgtgaaccaccatgcctggcccaggatagcactttttcctttcttctgctctcagttggttggaccactggttgcatctcttcccactctccctgaaaggcacagaactatcagacagaagacaaggtagttctcaagaagtaccaggcagctgtgtctgctagaggcttcctcagcaaagccccatcttgtggacaacctctcaggaattgcaggtggtgtgggagtggctgacagaggagggatccatatgtcttagaccaaagccaccagtcaggccttgccaccatatagaaccttccctttagaatatatttatttggaattttacttatagctgcaaatatatcattggctactatacccaagcatcaactcaaggaacatttggttttctggtgagcacagctgaagaccaaccaactagttactgatccagatgagggaagagaacatttattcagtcattctgttatgctaactattcattttctcatgaaaatgtagtctttggctgggcatggtggctcatgcctgtaatcccagcattttgggaggccaaagcgggcagatcatgaggtcacgagatcgagaccctcctggctaacacggtgaaaccccatctctactaaaaatacaaagaattagccgggcatagtggcaggcacctgtagccccagctactcgggaggctgaggcaggagaatggcgtgaacctgagaggtggagcttgcagtgagctgagattgtgccactacactccagcctgggcgacagagcaagactccgtctcaaaagagaaaatgttgtctttgccaggcagtgtggtaggcccaagagatatagcaattagagttgactaagacagtgtccctatcctgttcttgagctccagttctagtgggagttcttgagcttggtaagatgatgtgagtccatcagtggcccaggactctaagcatgtatgttttagtcccagctgtaaatgaggattccattaaccccatcttctccaatgtatggaggatgcaagaagctttaaaatgtccttttctcacagtgacttcccttgaccatgccttagtttcctcagccagaaattggagacagcaagagcacttatgcctgagttggtgagatggaatgatgtatcatatctcttccccttttattaaccagatcgtttaccagattgtacctggtgatgctggcagccagccctcttccggcccctatttctgcttaccgtgttaccagagagcctgggggtctggatcctatctggccccgtcagggtggattaccaaatgagcagttctcttgccccagtccctttcctgtgctataaataagccccatgtttattttcttatgttattgaaatgagcacttgtgatttgggcctcttttgaggagtccagagagcgtccatccggtgcctggtgagggccctgcatggctggctgctgtctgaagctatttggagtcctctccctgtgttttctatgtggcttaatttcaatagaaagggttatatgcaaccctgtatctgctgattttcaggtttcaactttctgccagcgtcactgcctgcttagaagtaaagttatgtttctcattaaggggataacagccacaattgaggtaattaacgaaaattgtacattggtggcagcacctcctataggatttccaatagtctttctctagtagatcattgggggctcaccttgatctcctctcttctgtctaccctgcaccaaaataccttgtcctgttttctggatatagttccaataatttttttcctaacagcctttttgtcaccagttggtttgatatcttacaacttggccaaatgagggttccattaactccatcttgtctaatgcatggagaattcaaggattttttttttctcttttcatagcaccttccagttgccagttgtaccctggcccttctttggaagtcataatgatgaatatccattaataagagattgatgctctttcaactctcatgtcatctataccatctcagtggagaggatgactttggatgaggttggaatagaaaggaaacatttggaagtccactgcagtgtattatatgctgtgtggaagtctgggggttaggaaatacctggagggagaacttcctaagaaatgatttttggttcttttaggccttaacagcacaataaaagtatcccatgagaccattatgagcaggacacgacattgtttcacaccttgggctgtgactatttacttctcggtacagattactctggttaaatcactcagtaaagaaatcttttcatgctcacaatctgaacctgaaggctattactgaagagaattgcatctgacaacaaaatttaatttacttccagagaaaggaccagaagaaagtaaattttcatttatgtttttaagtctattgtcttaaaaagattcttttcccttaaaaaataaaaaaacctgatgtgatgggttccttcagtcaacaaatacttattgagcagttattgtgtgccagatactgttcttggtgtgaggatatggcactgaacaaaacaatgtacctactttcgtcaagcttacattctaatgaggaagataaccaaaacaagtgactgaatataatttcaaatgtcaataaatgctgtgaagaaaataaa

SEQ ID NO: 14 - DNA, 10037 bp, Homo sapiens
  misc_feature 1..10037: note = Reverse Complement of SEQ ID NO:13
  source 1..10037: mol_type = genomic DNA
tttattttcttcacagcatttattgacatttgaaattatattcagtcacttgttttggttatcttcctcattagaatgtaagcttgacgaaagtaggtacattgttttgttcagtgccatatcctcacaccaagaacagtatctggcacacaataactgctcaataagtatttgttgactgaaggaacccatcacatcaggtttttttattttttaagggaaaagaatctttttaagacaatagacttaaaaacataaatgaaaatttactttcttctggtcctttctctggaagtaaattaaattttgttgtcagatgcaattctcttcagtaatagccttcaggttcagattgtgagcatgaaaagatttctttactgagtgatttaaccagagtaatctgtaccgagaagtaaatagtcacagcccaaggtgtgaaacaatgtcgtgtcctgctcataatggtctcatgggatacttttattgtgctgttaaggcctaaaagaaccaaaaatcatttcttaggaagttctccctccaggtatttcctaacccccagacttccacacagcatataatacactgcagtggacttccaaatgtttcctttctattccaacctcatccaaagtcatcctctccactgagatggtatagatgacatgagagttgaaagagcatcaatctcttattaatggatattcatcattatgacttccaaagaagggccagggtacaactggcaactggaaggtgctatgaaaagagaaaaaaaaaatccttgaattctccatgcattagacaagatggagttaatggaaccctcatttggccaagttgtaagatatcaaaccaactggtgacaaaaaggctgttaggaaaaaaattattggaactatatccagaaaacaggacaaggtattttggtgcagggtagacagaagagaggagatcaaggtgagcccccaatgatctactagagaaagactattggaaatcctataggaggtgctgccaccaatgtacaattttcgttaattacctcaattgtggctgttatccccttaatgagaaacataactttacttctaagcaggcagtgacgctggcagaaagttgaaacctgaaaatcagcagatacagggttgcatataaccctttctattgaaattaagccacatagaaaacacagggagaggactccaaatagcttcagacagcagccagccatgcagggccctcaccaggcaccggatggacgctctctggactcctcaaaagaggcccaaatcacaagtgctcatttcaataacataagaaaataaacatggggcttatttatagcacaggaaagggactggggcaagagaactgctcatttggtaatccaccctgacggggccagataggatccagacccccaggctctctggtaacacggtaagcagaaataggggccggaagagggctggctgccagcatcaccaggtacaatctggtaaacgatctggttaataaaaggggaagagatatgatacatcattccatctcaccaactcaggcataagtgctcttgctgtctccaatttctggctgaggaaactaaggcatggtcaagggaagtcactgtgagaaaaggacattttaaagcttcttgcatcctccatacattggagaagatggggttaatggaatcctcatttacagctgggactaaaacatacatgcttagagtcctgggccactgatggactcacatcatcttaccaagctcaagaactcccactagaactggagctcaagaacaggatagggacactgtcttagtcaactctaattgctatatctcttgggcctaccacactgcctggcaaagacaacattttctcttttgagacggagtcttgctctgtcgcccaggctggagtgtagtggcacaatctcagctcactgcaagctccacctctcaggttcacgccattctcctgcctcagcctcccgagtagctggggctacaggtgcctgccactatgcccggctaattctttgtatttttagtagagatggggtttcaccgtgttagccaggagggtctcgatctcgtgacctcatgatctgcccgctttggcctcccaaaatgctgggattacaggcatgagccaccatgcccagccaaagactacattttcatgagaaaatgaatagttagcataacagaatgactgaataaatgttctcttccctcatctggatcagtaactagttggttggtcttcagctgtgctcaccagaaaaccaaatgttccttgagttgatgcttgggtatagtagccaatgatatatttgcagctataagtaaaattccaaataaatatattctaaagggaaggttctatatggtggcaaggcctgactggtggctttggtctaagacatatggatccctcctctgtcagccactcccacaccacctgcaattcctgagaggttgtccacaagatggggctttgctgaggaagcctctagcagacacagctgcctggtacttcttgagaactaccttgtcttctgtctgatagttctgtgcctttcagggagagtgggaagagatgcaaccagtggtccaaccaactgagagcagaagaaaggaaaaagtgctatcctgggccaggcatggtggttcacacctgtaatcccaacactttgggacgctgaggcaggaggatcacttgatcccaggagttagagaccagcctaggcaacatagtgaggccctgtctctccaaaaaaattaaaagatcagccaggtgtggtggtgcacgcttttagtctcagctacttggaaggctgagatgggaagactgcttgagtccaggagtttgaggctgcagcgagccatgatcacagcactacactccagcctatgggacagagtgagactctgtttccaaagaaaaaacaaaaaaaacaaaaacaaacaaacaaacaaacaaaaaaactctaccctgaaatggttgcaaatgtgaagaaacaaaatgccagatacagatgctggtgactcaactatttcttgaaaaggaaagaggcctggaagcttgggagagggggccaaactttctctggtcatcttcccactgttgccagcaatggtgagccggaaattgaaagaatgacacaaggttgcctgtacagacccacacaccctcccaggaaattggggaagctgggcatccctaacagtccatttaatggaggtggaaaagaggctgtggcttgagcttacaatgccctcacccagtcttcagatgaactcacagctcccaccctaaaatgagggggaaacattaaaatttagagtgggtcttgcctgcctgactttcctctgccaagataagctcaataaggcctgttcacagatgatgcatggctggtataatgggaccaaatgctgcccttgattctactcagaagtagaaagtgggtgagtaccaaacacaggccgaggacaggaggtccagggcttggacagagctcaggggtgaggtgagtaggggcaggccccacaggtttcatatgcctccaggccctgcagtggaaagctcaagttgctttcaaagtctctctggatggaagctgctgccaatatggttaacactcctgccagaactgctcctcaggaagtggctggaggagacatggggccagtttagcattctctactctgcctctctgtgccagggctgcttggggaacagcccactgtggcttctcttgctgcaatggaagagtacccgagccaagagaaatggaaaaagcagcatacccccaaaggagctacaaagcaaaggaaacacaccaggctcatgatgggtggctgatgggaagtctccaacacccaaagcctttactctatcagctgggtcctcacaggatctaactgcagagctaggaagagccttcccagaacccaaccacttcccaaacccagtctctgcttcatctactttctgattactatcttggctgaaaactatcaaaggttcttggattttaacctcaaatcaacttcagaacctgtggctagaaacgtgctatctttcagtgataaagacgctctagtttcctcctggcatggtgcctgtcagaggctatcatcctagaaggaagctaggatcacagggttattagcaacatctttggccaatgagagcaaagagggagcttgtctcttccagctcccagtctgcgtcagcacagaccagcatgatggtcactattttccaaaggcagcagagaaaccagcacttaaaaaccacaagttcaaagcccagctggaagtagatgaggctttggcagagaaaccagggtggtcagagctttgaacttgatgacactgagtaaaggatacagtggctgagcgtggggactcacgcccgtaatcccagcactttgggaggtcaaggcgtgcagatcacctgaggtcaggagttcgagaccagcctggctaacgtggtgaaaccctgcctctactaaaattacaaacaaattagccaggcgtggtggcaagcgcctgtaatcccagctactcaggaggctgaggcaggagaatcacttgaacctgggaggcggaggatgtagtgagccgagaccatgctattgttgcactccagcctgggtgacaagagcaagactctgtctcaaaaaaaaaaaaaaaaaaaaggatacagcagagcatcactggcaggaaagaacacaagattctgacaactaaagttgctgtttttctctttaattctcccagaaaaggaggtttatacctaaatgtgtgagggttggtaaaatacatgagataaacattttaacaactatgtaatgttaatcagcaaaataaaaaagtatttccagccctggcattccaagcaggcccatcccagttaggcccctgggggcaaagccagtggctcagtgtgcacttgggccagggccagttcaagttcgtcttctctataggccagtaagatgtgtttctttaaaaagatttcttaatctaaaaccagctgttgtctgctgtaggccagaacacgacattttaattagcatgattgttctgcttctgaaaccaggctctatggcatcccgaggacagatgatcctgacctaagcttatgggtgaggtttgctggttagcagctcagaaatacacgaacaataaagtggagtccctagcccactctgaatccatgaatcgccatcacctgctatatccctgtcttgaatttctacggtgactgtaccacctatctgttcatagggtaacatcacctttgaggttgtttcaagtgcctaggatataatgctccttctttaacataaattgttttatgctgtgttgcaagatctaacacccaatattcctgggagtaatgaggtactttaaatggagttgtaatgcctttaaagtccaatgactcctatgacgatgataaagtcacacagctctctagggctcacaatgaactcagatgaaagagttcctcttcccaaatcaaaggactctcaagattttaaaaaataaaaatttaaaaatgtaccctttgggagagaagctgcattagaaaccagccactaaggtagtgcattcgatgatgagcaaaagggcagaaatttgaagaaaccagggcaatatgacacatacacaatgccagcacagtccatagctttcagcagagatttcaatgtaagaccctcccctatacctgccccacatcttggaaaacaaactagaaaacccctagaaagattagaggtcctcactgtgcttgtcagcctctggtacctgggtgacaacagaaatatttttcctggctttctaccatatcgtccccaatattatgaatacatgagaccaaaatgctttcccatgtctcctactgaccagtacacattacccaaatcaaaagtatttggtaagcacctgtgtttgctgctgtcagaaactgaaaaaaatcacttcagtttctgcatttgcaaaatgaacatctgcagcttcagtttctgcatttgcaaaatgaacaaactggatgagatgatcgcttgccccctttggcaataatagtccatgattcgatcacttattcaaatgaaagaagacaaaactcttatgatttccacttccaactttgctacttctgaaactttctttgacctctcaaagtctggggaacacatctgaagtgactcttgatgaaactacagcataataactgcccaccttcatgtcactcaacagaacaatggatggtgtatgactgacgctgactggcaaaacaactaggtttctgtaattatatccatattctaagcaaattgttatgtattttgtgttttggggacatatgttgtggctaaagcccaaactgtggctaatcttaatatcagagccagataaatctgtttcgaatccataacatttaacattcgccagggtagatttgttcatcaactgggcttaaagaggtataattcacacatgtgcagtattagtaaatgctgaaatttaatgatttaaatataccagcaactgttgcaaagcagttgtatagcagcatttaacgttagccagaacctccctggctaatgttaagtttataccaaaagaatgagagaaattttggcatccccttgggatgggggtcacaattcccacaacttttacgggtaccagctagagcgactccttgcatggctagtacagaccctctgtttttctctgacaatacctttaaaacattgactggatctaatcaggaagcaaacagattcctctggaggtttctgagtcatctgttcttaaaatggttatgatttgggaccttcttacgcttgatgcagagggtatcagacattcctcctggcgtgtgttcccagacatgggcagaagactgttgtcaggccaaagacggagttaaatatatcaagggagaaaggtggttccttggactatcaggaattggtgtttaagacacagtagaaaaaggaataaaaaataattttaatcatatcaaaaagccaaaccaaagaggaatagctcatggaactgacaggatcctgactcagcggctggtgctcttcctgtgcacaagcccagcactccaggtcccaaggcatttatcaaatcccaccaagatgtttggcttttgcaccgaattctgggtttggttccctgaaagaactcattgatgtaaataactaaaagtgaggtctgggtaccctttacatgattccccagacctcaaatgggctaacacgcttctcttctccagcagtcttcctgtccgtgaagtttccttccagattgttacatggaactgaaaacaaagggagcctcagctggatttaaatctggagcatgccacaaagtcttccacttggcattttcgagaagaacccatcagagatcataagaaatacaagaacagaggttgcatagctcgaggtgcttggatattcattctaggttcttgttcttgagaaagtgggttaggtgggtgcatgccaagatccaagtaggtcaaccttccacccttaacctactactctgacatcagagtgctgggaggccttgttctctccctctgtcccagcctcacattcagacctccaccaatgacacgtttcataagctgccaatgttggggaagctcttcagcttctcaggaaagtcatctttgtacaggacagggtcagctcggtgttccaccaccttgagaggcatggtcccgaagactgaagcaaacttgttgatgcactctgacctctccaccatgtgtgtttggtctagtgaaagcccatctatggctgtgcactcaggacacttgaatttctttcgtggggttaccttgataactgcttttcccgtgacgttggccaccaggaagttcatggcaatatcttcacagttcatatgagcatctacccagttcttgatatccccaggcattttgtaggtatacaggtaattaaaatacttgtgataaaaagctgccccagtgagcaccatggacacttcattcgtccactcagactcatacttccacttattcatctcatggtcccagagatgcagacgacccgggtaacccaccaaccggtcaggaaattcccgccagacctcataaccaaattgcagctcgtcagaggtcagcataatgatatcatcatcaatggccagaacagcttctgtctcgatttcatcataagggaagaaacggttacttaacttgttttcagcagtcctcacaacttttaatggaacccggattttgggccagagagaatcttctggagggtttttattctgattattccagacgacaagtagtttggatagactgggcaccttggacacttcagtgatgacccggaagaggctctctactcggtcgtaggtgaggactatggcggtgaacccttgagactgtggtgggatcagcgggaggaagagtggattgctcacgctgccccacttcacagcaggagggtcattccattcttcataggagatggcagcatatggatagatccggtcattgataatctgcagggtggccagggcaatggctttaattgactggaagtacgcttcccagaaccaccgggcctgtctctgcatttcttcaatctgtctttgggggatgctctgcaaaatactgtacacatctgacatcttttcttctggtacaaccacagatgctctcttccagtcaagaacttcagagaaaggcaaaatataggagtctgcaatgacaaccgggacacagccagcttgtaacacatcgctcaatactgcctggcccagccgagctccacgaagaaccacacagaaagtagcctcctgtagcacctgtgggtaatcgaagacctggtgcttgtggcagcgcttacggacagaaaggacaccctctgagaggttggtgcatttatcgagtactaacactgactctccatgtttgacctggagggcttctaggtcctctctgtactcaggatggagacccacctgagatgacaggaggaagtattgccgtggacctggtcctttctctggaagatccacctcagctgacagtggactatagacaggaatgctgacatcgtagccttgccggtaagtccacgtagaaaagccgccaccagccaacagggccctgtctctggggacatccagggctgtgttataatctgggggacctccaggcaacatgttgaacaacaggtgattcgtacctcgatcccacctagagagctgggccatcgcttgtgctgtctccttgatgcgcagtgtgttctggttaagcacatcgatggagggaacaaacagacaggcccggttgatgtcatcagtgtagtagtcactgtctgagatggccatgagcagttcattatactcccgggagatggtgttgctgacagagacgccaaagtcatccacgtactttttcagagcatagatatacaccttgattttgttctttgggttgaagccacagcgatagacatcaaaacacgtgtgcattctgcaactgagatccccccgctctgggatgggactgtcggctggcagcctaacaaccggcacatcacggatgctgcgcttctctacattccagtcatttgaggactcgatagaatggggccaaaactgaaacatgccagtggcaatgaggcccaggaggacaatggagaagagggtgatatagtagattcggtgcttggtcttcattcttgggatgagggcaggaccccggatattatacttgaccgacgcacacataatgacacagacagcctcttcctcacactcctcggccacggctgcctcccgctcggccccgagcttggtcaccggctcatgccgcggggcgcgggccacctccgcccaggtcggatcggtccgaatcgccagccgccactgccagggccgagtctgggctggcgagcagcgagcgaggggccggtaaccgggatccgggccgtct

SEQ ID NO: 15 - DNA, 10067 bp, Homo sapiens
  misc_feature 1..10067: note = >NM_001178083.3 Homo sapiens exostosin glycosyltransferase 2 (EXT2), transcript variant 3, mRNA
  source 1..10067: mol_type = genomic DNA
agacggcccggatcccggttaccggcccctcgctcgctgctcgccagcccagactcggccctggcagtggcggctggcgattcggaccgatccgacctgggcggaggtggcccgcgccccgcggcatgagccggtgaccaagctcggggccgagcgggaggcagccgtggccgaggagtgtgaggaagaggctgtctgtgtcattatgtgtgcgtcggtcaagtataatatccggggtcctgccctcatcccaagaatgaagaccaagcaccgaatctactatatcaccctcttctccattgtcctcctgggcctcattgccactggcatgtttcagttttggccccattctatcgagtcctcaaatgactggaatgtagagaagcgcagcatccgtgatgtgccggttgttaggctgccagccgacagtcccatcccagagcggggggatctcagttgcagaatgcacacgtgttttgatgtctatcgctgtggcttcaacccaaagaacaaaatcaaggtgtatatctatgctctgaaaaagtacgtggatgactttggcgtctctgtcagcaacaccatctcccgggagtataatgaactgctcatggccatctcagacagtgactactacactgatgacatcaaccgggcctgtctgtttgttccctccatcgatgtgcttaaccagaacacactgcgcatcaaggagacagcacaagcgatggcccagctctctaggtgggatcgaggtacgaatcacctgttgttcaacatgttgcctggaggtcccccagattataacacagccctggatgtccccagagacagggccctgttggctggtggcggcttttctacgtggacttaccggcaaggctacgatgtcagcattcctgtctatagtccactgtcagctgaggtggatcttccagagaaaggaccaggtccacggcaatacttcctcctgtcatctcaggtgggtctccatcctgagtacagagaggacctagaagccctccaggtcaaacatggagagtcagtgttagtactcgataaatgcaccaacctctcagagggtgtcctttctgtccgtaagcgctgccacaagcaccaggtcttcgattacccacaggtgctacaggaggctactttctgtgtggttcttcgtggagctcggctgggccaggcagtattgagcgatgtgttacaagctggctgtgtcccggttgtcattgcagactcctatattttgcctttctctgaagttcttgactggaagagagcatctgtggttgtaccagaagaaaagatgtcagatgtgtacagtattttgcagagcatcccccaaagacagattgaagaaatgcagagacagctcttcatggaaccagccaggagagagaactggtcagctgctaatcaccaaatgaactccctgatctggcctagggaacagtgggattcacagattatcaatgaccggatctatccatatgctgccatctcctatgaagaatggaatgaccctcctgctgtgaagtggggcagcgtgagcaatccactcttcctcccgctgatcccaccacagtctcaagggttcaccgccatagtcctcacctacgaccgagtagagagcctcttccgggtcatcactgaagtgtccaaggtgcccagtctatccaaactacttgtcgtctggaataatcagaataaaaaccctccagaagattctctctggcccaaaatccgggttccattaaaagttgtgaggactgctgaaaacaagttaagtaaccgtttcttcccttatgatgaaatcgagacagaagctgttctggccattgatgatgatatcattatgctgacctctgacgagctgcaatttggttatgaggtctggcgggaatttcctgaccggttggtgggttacccgggtcgtctgcatctctgggaccatgagatgaataagtggaagtatgagtctgagtggacgaatgaagtgtccatggtgctcactggggcagctttttatcacaagtattttaattacctgtatacctacaaaatgcctggggatatcaagaactgggtagatgctcatatgaactgtgaagatattgccatgaacttcctggtggccaacgtcacgggaaaagcagttatcaaggtaaccccacgaaagaaattcaagtgtcctgagtgcacagccatagatgggctttcactagaccaaacacacatggtggagaggtcagagtgcatcaacaagtttgcttcagtcttcgggaccatgcctctcaaggtggtggaacaccgagctgaccctgtcctgtacaaagatgactttcctgagaagctgaagagcttccccaacattggcagcttatgaaacgtgtcattggtggaggtctgaatgtgaggctgggacagagggagagaacaaggcctcccagcactctgatgtcagagtagtaggttaagggtggaaggttgacctacttggatcttggcatgcacccacctaacccactttctcaagaacaagaacctagaatgaatatccaagcacctcgagctatgcaacctctgttcttgtatttcttatgatctctgatgggttcttctcgaaaatgccaagtggaagactttgtggcatgctccagatttaaatccagctgaggctccctttgttttcagttccatgtaacaatctggaaggaaacttcacggacaggaagactgctggagaagagaagcgtgttagcccatttgaggtctggggaatcatgtaaagggtacccagacctcacttttagttatttacatcaatgagttctttcagggaaccaaacccagaattcggtgcaaaagccaaacatcttggtgggatttgataaatgccttgggacctggagtgctgggcttgtgcacaggaagagcaccagccgctgagtcaggatcctgtcagttccatgagctattcctctttggtttggctttttgatatgattaaaattattttttattcctttttctactgtgtcttaaacaccaattcctgatagtccaaggaaccacctttctcccttgatatatttaactccgtctttggcctgacaacagtcttctgcccatgtctgggaacacacgccaggaggaatgtctgataccctctgcatcaagcgtaagaaggtcccaaatcataaccattttaagaacagatgactcagaaacctccagaggaatctgtttgcttcctgattagatccagtcaatgttttaaaggtattgtcagagaaaaacagagggtctgtactagccatgcaaggagtcgctctagctggtacccgtaaaagttgtgggaattgtgacccccatcccaaggggatgccaaaatttctctcattcttttggtataaacttaacattagccagggaggttctggctaacgttaaatgctgctatacaactgctttgcaacagttgctggtatatttaaatcattaaatttcagcatttactaatactgcacatgtgtgaattatacctctttaagcccagttgatgaacaaatctaccctggcgaatgttaaatgttatggattcgaaacagatttatctggctctgatattaagattagccacagtttgggctttagccacaacatatgtccccaaaacacaaaatacataacaatttgcttagaatatggatataattacagaaacctagttgttttgccagtcagcgtcagtcatacaccatccattgttctgttgagtgacatgaaggtgggcagttattatgctgtagtttcatcaagagtcacttcagatgtgttccccagactttgagaggtcaaagaaagtttcagaagtagcaaagttggaagtggaaatcataagagttttgtcttctttcatttgaataagtgatcgaatcatggactattattgccaaagggggcaagcgatcatctcatccagtttgttcattttgcaaatgcagaaactgaagctgcagatgttcattttgcaaatgcagaaactgaagtgatttttttcagtttctgacagcagcaaacacaggtgcttaccaaatacttttgatttgggtaatgtgtactggtcagtaggagacatgggaaagcattttggtctcatgtattcataatattggggacgatatggtagaaagccaggaaaaatatttctgttgtcacccaggtaccagaggctgacaagcacagtgaggacctctaatctttctaggggttttctagtttgttttccaagatgtggggcaggtataggggagggtcttacattgaaatctctgctgaaagctatggactgtgctggcattgtgtatgtgtcatattgccctggtttcttcaaatttctgcccttttgctcatcatcgaatgcactaccttagtggctggtttctaatgcagcttctctcccaaagggtacatttttaaatttttattttttaaaatcttgagagtcctttgatttgggaagaggaactctttcatctgagttcattgtgagccctagagagctgtgtgactttatcatcgtcataggagtcattggactttaaaggcattacaactccatttaaagtacctcattactcccaggaatattgggtgttagatcttgcaacacagcataaaacaatttatgttaaagaaggagcattatatcctaggcacttgaaacaacctcaaaggtgatgttaccctatgaacagataggtggtacagtcaccgtagaaattcaagacagggatatagcaggtgatggcgattcatggattcagagtgggctagggactccactttattgttcgtgtatttctgagctgctaaccagcaaacctcacccataagcttaggtcaggatcatctgtcctcgggatgccatagagcctggtttcagaagcagaacaatcatgctaattaaaatgtcgtgttctggcctacagcagacaacagctggttttagattaagaaatctttttaaagaaacacatcttactggcctatagagaagacgaacttgaactggccctggcccaagtgcacactgagccactggctttgcccccaggggcctaactgggatgggcctgcttggaatgccagggctggaaatacttttttattttgctgattaacattacatagttgttaaaatgtttatctcatgtattttaccaaccctcacacatttaggtataaacctccttttctgggagaattaaagagaaaaacagcaactttagttgtcagaatcttgtgttctttcctgccagtgatgctctgctgtatccttttttttttttttttttttgagacagagtcttgctcttgtcacccaggctggagtgcaacaatagcatggtctcggctcactacatcctccgcctcccaggttcaagtgattctcctgcctcagcctcctgagtagctgggattacaggcgcttgccaccacgcctggctaatttgtttgtaattttagtagaggcagggtttcaccacgttagccaggctggtctcgaactcctgacctcaggtgatctgcacgccttgacctcccaaagtgctgggattacgggcgtgagtccccacgctcagccactgtatcctttactcagtgtcatcaagttcaaagctctgaccaccctggtttctctgccaaagcctcatctacttccagctgggctttgaacttgtggtttttaagtgctggtttctctgctgcctttggaaaatagtgaccatcatgctggtctgtgctgacgcagactgggagctggaagagacaagctccctctttgctctcattggccaaagatgttgctaataaccctgtgatcctagcttccttctaggatgatagcctctgacaggcaccatgccaggaggaaactagagcgtctttatcactgaaagatagcacgtttctagccacaggttctgaagttgatttgaggttaaaatccaagaacctttgatagttttcagccaagatagtaatcagaaagtagatgaagcagagactgggtttgggaagtggttgggttctgggaaggctcttcctagctctgcagttagatcctgtgaggacccagctgatagagtaaaggctttgggtgttggagacttcccatcagccacccatcatgagcctggtgtgtttcctttgctttgtagctcctttgggggtatgctgctttttccatttctcttggctcgggtactcttccattgcagcaagagaagccacagtgggctgttccccaagcagccctggcacagagaggcagagtagagaatgctaaactggccccatgtctcctccagccacttcctgaggagcagttctggcaggagtgttaaccatattggcagcagcttccatccagagagactttgaaagcaacttgagctttccactgcagggcctggaggcatatgaaacctgtggggcctgcccctactcacctcacccctgagctctgtccaagccctggacctcctgtcctcggcctgtgtttggtactcacccactttctacttctgagtagaatcaagggcagcatttggtcccattataccagccatgcatcatctgtgaacaggccttattgagcttatcttggcagaggaaagtcaggcaggcaagacccactctaaattttaatgtttccccctcattttagggtgggagctgtgagttcatctgaagactgggtgagggcattgtaagctcaagccacagcctcttttccacctccattaaatggactgttagggatgcccagcttccccaatttcctgggagggtgtgtgggtctgtacaggcaaccttgtgtcattctttcaatttccggctcaccattgctggcaacagtgggaagatgaccagagaaagtttggccccctctcccaagcttccaggcctctttccttttcaagaaatagttgagtcaccagcatctgtatctggcattttgtttcttcacatttgcaaccatttcagggtagagtttttttgtttgtttgtttgtttgtttttgttttttttgttttttctttggaaacagagtctcactctgtcccataggctggagtgtagtgctgtgatcatggctcgctgcagcctcaaactcctggactcaagcagtcttcccatctcagccttccaagtagctgagactaaaagcgtgcaccaccacacctggctgatcttttaatttttttggagagacagggcctcactatgttgcctaggctggtctctaactcctgggatcaagtgatcctcctgcctcagcgtcccaaagtgttgggattacaggtgtgaaccaccatgcctggcccaggatagcactttttcctttcttctgctctcagttggttggaccactggttgcatctcttcccactctccctgaaaggcacagaactatcagacagaagacaaggtagttctcaagaagtaccaggcagctgtgtctgctagaggcttcctcagcaaagccccatcttgtggacaacctctcaggaattgcaggtggtgtgggagtggctgacagaggagggatccatatgtcttagaccaaagccaccagtcaggccttgccaccatatagaaccttccctttagaatatatttatttggaattttacttatagctgcaaatatatcattggctactatacccaagcatcaactcaaggaacatttggttttctggtgagcacagctgaagaccaaccaactagttactgatccagatgagggaagagaacatttattcagtcattctgttatgctaactattcattttctcatgaaaatgtagtctttggctgggcatggtggctcatgcctgtaatcccagcattttgggaggccaaagcgggcagatcatgaggtcacgagatcgagaccctcctggctaacacggtgaaaccccatctctactaaaaatacaaagaattagccgggcatagtggcaggcacctgtagccccagctactcgggaggctgaggcaggagaatggcgtgaacctgagaggtggagcttgcagtgagctgagattgtgccactacactccagcctgggcgacagagcaagactccgtctcaaaagagaaaatgttgtctttgccaggcagtgtggtaggcccaagagatatagcaattagagttgactaagacagtgtccctatcctgttcttgagctccagttctagtgggagttcttgagcttggtaagatgatgtgagtccatcagtggcccaggactctaagcatgtatgttttagtcccagctgtaaatgaggattccattaaccccatcttctccaatgtatggaggatgcaagaagctttaaaatgtccttttctcacagtgacttcccttgaccatgccttagtttcctcagccagaaattggagacagcaagagcacttatgcctgagttggtgagatggaatgatgtatcatatctcttccccttttattaaccagatcgtttaccagattgtacctggtgatgctggcagccagccctcttccggcccctatttctgcttaccgtgttaccagagagcctgggggtctggatcctatctggccccgtcagggtggattaccaaatgagcagttctcttgccccagtccctttcctgtgctataaataagccccatgtttattttcttatgttattgaaatgagcacttgtgatttgggcctcttttgaggagtccagagagcgtccatccggtgcctggtgagggccctgcatggctggctgctgtctgaagctatttggagtcctctccctgtgttttctatgtggcttaatttcaatagaaagggttatatgcaaccctgtatctgctgattttcaggtttcaactttctgccagcgtcactgcctgcttagaagtaaagttatgtttctcattaaggggataacagccacaattgaggtaattaacgaaaattgtacattggtggcagcacctcctataggatttccaatagtctttctctagtagatcattgggggctcaccttgatctcctctcttctgtctaccctgcaccaaaataccttgtcctgttttctggatatagttccaataatttttttcctaacagcctttttgtcaccagttggtttgatatcttacaacttggccaaatgagggttccattaactccatcttgtctaatgcatggagaattcaaggattttttttttctcttttcatagcaccttccagttgccagttgtaccctggcccttctttggaagtcataatgatgaatatccattaataagagattgatgctctttcaactctcatgtcatctataccatctcagtggagaggatgactttggatgaggttggaatagaaaggaaacatttggaagtccactgcagtgtattatatgctgtgtggaagtctgggggttaggaaatacctggagggagaacttcctaagaaatgatttttggttcttttaggccttaacagcacaataaaagtatcccatgagaccattatgagcaggacacgacattgtttcacaccttgggctgtgactatttacttctcggtacagattactctggttaaatcactcagtaaagaaatcttttcatgctcacaatctgaacctgaaggctattactgaagagaattgcatctgacaacaaaatttaatttacttccagagaaaggaccagaagaaagtaaattttcatttatgtttttaagtctattgtcttaaaaagattcttttcccttaaaaaataaaaaaacctgatgtgatgggttccttcagtcaacaaatacttattgagcagttattgtgtgccagatactgttcttggtgtgaggatatggcactgaacaaaacaatgtacctactttcgtcaagcttacattctaatgaggaagataaccaaaacaagtgactgaatataatttcaaatgtcaataaatgctgtgaagaaaataaa

SEQ ID NO: 16 - DNA, 10067 bp, Homo sapiens
  misc_feature 1..10067: note = Reverse Complement of SEQ ID NO:15
  source 1..10067: mol_type = genomic DNA
tttattttcttcacagcatttattgacatttgaaattatattcagtcacttgttttggttatcttcctcattagaatgtaagcttgacgaaagtaggtacattgttttgttcagtgccatatcctcacaccaagaacagtatctggcacacaataactgctcaataagtatttgttgactgaaggaacccatcacatcaggtttttttattttttaagggaaaagaatctttttaagacaatagacttaaaaacataaatgaaaatttactttcttctggtcctttctctggaagtaaattaaattttgttgtcagatgcaattctcttcagtaatagccttcaggttcagattgtgagcatgaaaagatttctttactgagtgatttaaccagagtaatctgtaccgagaagtaaatagtcacagcccaaggtgtgaaacaatgtcgtgtcctgctcataatggtctcatgggatacttttattgtgctgttaaggcctaaaagaaccaaaaatcatttcttaggaagttctccctccaggtatttcctaacccccagacttccacacagcatataatacactgcagtggacttccaaatgtttcctttctattccaacctcatccaaagtcatcctctccactgagatggtatagatgacatgagagttgaaagagcatcaatctcttattaatggatattcatcattatgacttccaaagaagggccagggtacaactggcaactggaaggtgctatgaaaagagaaaaaaaaaatccttgaattctccatgcattagacaagatggagttaatggaaccctcatttggccaagttgtaagatatcaaaccaactggtgacaaaaaggctgttaggaaaaaaattattggaactatatccagaaaacaggacaaggtattttggtgcagggtagacagaagagaggagatcaaggtgagcccccaatgatctactagagaaagactattggaaatcctataggaggtgctgccaccaatgtacaattttcgttaattacctcaattgtggctgttatccccttaatgagaaacataactttacttctaagcaggcagtgacgctggcagaaagttgaaacctgaaaatcagcagatacagggttgcatataaccctttctattgaaattaagccacatagaaaacacagggagaggactccaaatagcttcagacagcagccagccatgcagggccctcaccaggcaccggatggacgctctctggactcctcaaaagaggcccaaatcacaagtgctcatttcaataacataagaaaataaacatggggcttatttatagcacaggaaagggactggggcaagagaactgctcatttggtaatccaccctgacggggccagataggatccagacccccaggctctctggtaacacggtaagcagaaataggggccggaagagggctggctgccagcatcaccaggtacaatctggtaaacgatctggttaataaaaggggaagagatatgatacatcattccatctcaccaactcaggcataagtgctcttgctgtctccaatttctggctgaggaaactaaggcatggtcaagggaagtcactgtgagaaaaggacattttaaagcttcttgcatcctccatacattggagaagatggggttaatggaatcctcatttacagctgggactaaaacatacatgcttagagtcctgggccactgatggactcacatcatcttaccaagctcaagaactcccactagaactggagctcaagaacaggatagggacactgtcttagtcaactctaattgctatatctcttgggcctaccacactgcctggcaaagacaacattttctcttttgagacggagtcttgctctgtcgcccaggctggagtgtagtggcacaatctcagctcactgcaagctccacctctcaggttcacgccattctcctgcctcagcctcccgagtagctggggctacaggtgcctgccactatgcccggctaattctttgtatttttagtagagatggggtttcaccgtgttagccaggagggtctcgatctcgtgacctcatgatctgcccgctttggcctcccaaaatgctgggattacaggcatgagccaccatgcccagccaaagactacattttcatgagaaaatgaatagttagcataacagaatgactgaataaatgttctcttccctcatctggatcagtaactagttggttggtcttcagctgtgctcaccagaaaaccaaatgttccttgagttgatgcttgggtatagtagccaatgatatatttgcagctataagtaaaattccaaataaatatattctaaagggaaggttctatatggtggcaaggcctgactggtggctttggtctaagacatatggatccctcctctgtcagccactcccacaccacctgcaattcctgagaggttgtccacaagatggggctttgctgaggaagcctctagcagacacagctgcctggtacttcttgagaactaccttgtcttctgtctgatagttctgtgcctttcagggagagtgggaagagatgcaaccagtggtccaaccaactgagagcagaagaaaggaaaaagtgctatcctgggccaggcatggtggttcacacctgtaatcccaacactttgggacgctgaggcaggaggatcacttgatcccaggagttagagaccagcctaggcaacatagtgaggccctgtctctccaaaaaaattaaaagatcagccaggtgtggtggtgcacgcttttagtctcagctacttggaaggctgagatgggaagactgcttgagtccaggagtttgaggctgcagcgagccatgatcacagcactacactccagcctatgggacagagtgagactctgtttccaaagaaaaaacaaaaaaaacaaaaacaaacaaacaaacaaacaaaaaaactctaccctgaaatggttgcaaatgtgaagaaacaaaatgccagatacagatgctggtgactcaactatttcttgaaaaggaaagaggcctggaagcttgggagagggggccaaactttctctggtcatcttcccactgttgccagcaatggtgagccggaaattgaaagaatgacacaaggttgcctgtacagacccacacaccctcccaggaaattggggaagctgggcatccctaacagtccatttaatggaggtggaaaagaggctgtggcttgagcttacaatgccctcacccagtcttcagatgaactcacagctcccaccctaaaatgagggggaaacattaaaatttagagtgggtcttgcctgcctgactttcctctgccaagataagctcaataaggcctgttcacagatgatgcatggctggtataatgggaccaaatgctgcccttgattctactcagaagtagaaagtgggtgagtaccaaacacaggccgaggacaggaggtccagggcttggacagagctcaggggtgaggtgagtaggggcaggccccacaggtttcatatgcctccaggccctgcagtggaaagctcaagttgctttcaaagtctctctggatggaagctgctgccaatatggttaacactcctgccagaactgctcctcaggaagtggctggaggagacatggggccagtttagcattctctactctgcctctctgtgccagggctgcttggggaacagcccactgtggcttctcttgctgcaatggaagagtacccgagccaagagaaatggaaaaagcagcatacccccaaaggagctacaaagcaaaggaaacacaccaggctcatgatgggtggctgatgggaagtctccaacacccaaagcctttactctatcagctgggtcctcacaggatctaactgcagagctaggaagagccttcccagaacccaaccacttcccaaacccagtctctgcttcatctactttctgattactatcttggctgaaaactatcaaaggttcttggattttaacctcaaatcaacttcagaacctgtggctagaaacgtgctatctttcagtgataaagacgctctagtttcctcctggcatggtgcctgtcagaggctatcatcctagaaggaagctaggatcacagggttattagcaacatctttggccaatgagagcaaagagggagcttgtctcttccagctcccagtctgcgtcagcacagaccagcatgatggtcactattttccaaaggcagcagagaaaccagcacttaaaaaccacaagttcaaagcccagctggaagtagatgaggctttggcagagaaaccagggtggtcagagctttgaacttgatgacactgagtaaaggatacagtggctgagcgtggggactcacgcccgtaatcccagcactttgggaggtcaaggcgtgcagatcacctgaggtcaggagttcgagaccagcctggctaacgtggtgaaaccctgcctctactaaaattacaaacaaattagccaggcgtggtggcaagcgcctgtaatcccagctactcaggaggctgaggcaggagaatcacttgaacctgggaggcggaggatgtagtgagccgagaccatgctattgttgcactccagcctgggtgacaagagcaagactctgtctcaaaaaaaaaaaaaaaaaaaaggatacagcagagcatcactggcaggaaagaacacaagattctgacaactaaagttgctgtttttctctttaattctcccagaaaaggaggtttatacctaaatgtgtgagggttggtaaaatacatgagataaacattttaacaactatgtaatgttaatcagcaaaataaaaaagtatttccagccctggcattccaagcaggcccatcccagttaggcccctgggggcaaagccagtggctcagtgtgcacttgggccagggccagttcaagttcgtcttctctataggccagtaagatgtgtttctttaaaaagatttcttaatctaaaaccagctgttgtctgctgtaggccagaacacgacattttaattagcatgattgttctgcttctgaaaccaggctctatggcatcccgaggacagatgatcctgacctaagcttatgggtgaggtttgctggttagcagctcagaaatacacgaacaataaagtggagtccctagcccactctgaatccatgaatcgccatcacctgctatatccctgtcttgaatttctacggtgactgtaccacctatctgttcatagggtaacatcacctttgaggttgtttcaagtgcctaggatataatgctccttctttaacataaattgttttatgctgtgttgcaagatctaacacccaatattcctgggagtaatgaggtactttaaatggagttgtaatgcctttaaagtccaatgactcctatgacgatgataaagtcacacagctctctagggctcacaatgaactcagatgaaagagttcctcttcccaaatcaaaggactctcaagattttaaaaaataaaaatttaaaaatgtaccctttgggagagaagctgcattagaaaccagccactaaggtagtgcattcgatgatgagcaaaagggcagaaatttgaagaaaccagggcaatatgacacatacacaatgccagcacagtccatagctttcagcagagatttcaatgtaagaccctcccctatacctgccccacatcttggaaaacaaactagaaaacccctagaaagattagaggtcctcactgtgcttgtcagcctctggtacctgggtgacaacagaaatatttttcctggctttctaccatatcgtccccaatattatgaatacatgagaccaaaatgctttcccatgtctcctactgaccagtacacattacccaaatcaaaagtatttggtaagcacctgtgtttgctgctgtcagaaactgaaaaaaatcacttcagtttctgcatttgcaaaatgaacatctgcagcttcagtttctgcatttgcaaaatgaacaaactggatgagatgatcgcttgccccctttggcaataatagtccatgattcgatcacttattcaaatgaaagaagacaaaactcttatgatttccacttccaactttgctacttctgaaactttctttgacctctcaaagtctggggaacacatctgaagtgactcttgatgaaactacagcataataactgcccaccttcatgtcactcaacagaacaatggatggtgtatgactgacgctgactggcaaaacaactaggtttctgtaattatatccatattctaagcaaattgttatgtattttgtgttttggggacatatgttgtggctaaagcccaaactgtggctaatcttaatatcagagccagataaatctgtttcgaatccataacatttaacattcgccagggtagatttgttcatcaactgggcttaaagaggtataattcacacatgtgcagtattagtaaatgctgaaatttaatgatttaaatataccagcaactgttgcaaagcagttgtatagcagcatttaacgttagccagaacctccctggctaatgttaagtttataccaaaagaatgagagaaattttggcatccccttgggatgggggtcacaattcccacaacttttacgggtaccagctagagcgactccttgcatggctagtacagaccctctgtttttctctgacaatacctttaaaacattgactggatctaatcaggaagcaaacagattcctctggaggtttctgagtcatctgttcttaaaatggttatgatttgggaccttcttacgcttgatgcagagggtatcagacattcctcctggcgtgtgttcccagacatgggcagaagactgttgtcaggccaaagacggagttaaatatatcaagggagaaaggtggttccttggactatcaggaattggtgtttaagacacagtagaaaaaggaataaaaaataattttaatcatatcaaaaagccaaaccaaagaggaatagctcatggaactgacaggatcctgactcagcggctggtgctcttcctgtgcacaagcccagcactccaggtcccaaggcatttatcaaatcccaccaagatgtttggcttttgcaccgaattctgggtttggttccctgaaagaactcattgatgtaaataactaaaagtgaggtctgggtaccctttacatgattccccagacctcaaatgggctaacacgcttctcttctccagcagtcttcctgtccgtgaagtttccttccagattgttacatggaactgaaaacaaagggagcctcagctggatttaaatctggagcatgccacaaagtcttccacttggcattttcgagaagaacccatcagagatcataagaaatacaagaacagaggttgcatagctcgaggtgcttggatattcattctaggttcttgttcttgagaaagtgggttaggtgggtgcatgccaagatccaagtaggtcaaccttccacccttaacctactactctgacatcagagtgctgggaggccttgttctctccctctgtcccagcctcacattcagacctccaccaatgacacgtttcataagctgccaatgttggggaagctcttcagcttctcaggaaagtcatctttgtacaggacagggtcagctcggtgttccaccaccttgagaggcatggtcccgaagactgaagcaaacttgttgatgcactctgacctctccaccatgtgtgtttggtctagtgaaagcccatctatggctgtgcactcaggacacttgaatttctttcgtggggttaccttgataactgcttttcccgtgacgttggccaccaggaagttcatggcaatatcttcacagttcatatgagcatctacccagttcttgatatccccaggcattttgtaggtatacaggtaattaaaatacttgtgataaaaagctgccccagtgagcaccatggacacttcattcgtccactcagactcatacttccacttattcatctcatggtcccagagatgcagacgacccgggtaacccaccaaccggtcaggaaattcccgccagacctcataaccaaattgcagctcgtcagaggtcagcataatgatatcatcatcaatggccagaacagcttctgtctcgatttcatcataagggaagaaacggttacttaacttgttttcagcagtcctcacaacttttaatggaacccggattttgggccagagagaatcttctggagggtttttattctgattattccagacgacaagtagtttggatagactgggcaccttggacacttcagtgatgacccggaagaggctctctactcggtcgtaggtgaggactatggcggtgaacccttgagactgtggtgggatcagcgggaggaagagtggattgctcacgctgccccacttcacagcaggagggtcattccattcttcataggagatggcagcatatggatagatccggtcattgataatctgtgaatcccactgttccctaggccagatcagggagttcatttggtgattagcagctgaccagttctctctcctggctggttccatgaagagctgtctctgcatttcttcaatctgtctttgggggatgctctgcaaaatactgtacacatctgacatcttttcttctggtacaaccacagatgctctcttccagtcaagaacttcagagaaaggcaaaatataggagtctgcaatgacaaccgggacacagccagcttgtaacacatcgctcaatactgcctggcccagccgagctccacgaagaaccacacagaaagtagcctcctgtagcacctgtgggtaatcgaagacctggtgcttgtggcagcgcttacggacagaaaggacaccctctgagaggttggtgcatttatcgagtactaacactgactctccatgtttgacctggagggcttctaggtcctctctgtactcaggatggagacccacctgagatgacaggaggaagtattgccgtggacctggtcctttctctggaagatccacctcagctgacagtggactatagacaggaatgctgacatcgtagccttgccggtaagtccacgtagaaaagccgccaccagccaacagggccctgtctctggggacatccagggctgtgttataatctgggggacctccaggcaacatgttgaacaacaggtgattcgtacctcgatcccacctagagagctgggccatcgcttgtgctgtctccttgatgcgcagtgtgttctggttaagcacatcgatggagggaacaaacagacaggcccggttgatgtcatcagtgtagtagtcactgtctgagatggccatgagcagttcattatactcccgggagatggtgttgctgacagagacgccaaagtcatccacgtactttttcagagcatagatatacaccttgattttgttctttgggttgaagccacagcgatagacatcaaaacacgtgtgcattctgcaactgagatccccccgctctgggatgggactgtcggctggcagcctaacaaccggcacatcacggatgctgcgcttctctacattccagtcatttgaggactcgatagaatggggccaaaactgaaacatgccagtggcaatgaggcccaggaggacaatggagaagagggtgatatagtagattcggtgcttggtcttcattcttgggatgagggcaggaccccggatattatacttgaccgacgcacacataatgacacagacagcctcttcctcacactcctcggccacggctgcctcccgctcggccccgagcttggtcaccggctcatgccgcggggcgcgggccacctccgcccaggtcggatcggtccgaatcgccagccgccactgccagggccgagtctgggctggcgagcagcgagcgaggggccggtaaccgggatccgggccgtct

SEQ ID NO: 17 - DNA, 9986 bp, Homo sapiens
  misc_feature 1..9986: note = >NM_001389628.1 Homo sapiens exostosin glycosyltransferase 2 (EXT2), transcript variant 4, mRNA
  source 1..9986: mol_type = genomic DNA
cccttcctgctgccaccttcccgccagccacagggatctgattcctcccagggggatgtcctgcgcctcagggtccggtggtggcctgcggcatcccttgcggtgccagaagccgtgggacgaggagtgtgaggaagaggctgtctgtgtcattatgtgtgcgtcggtcaagtataatatccggggtcctgccctcatcccaagaatgaagaccaagcaccgaatctactatatcaccctcttctccattgtcctcctgggcctcattgccactggcatgtttcagttttggccccattctatcgagtcctcaaatgactggaatgtagagaagcgcagcatccgtgatgtgccggttgttaggctgccagccgacagtcccatcccagagcggggggatctcagttgcagaatgcacacgtgttttgatgtctatcgctgtggcttcaacccaaagaacaaaatcaaggtgtatatctatgctctgaaaaagtacgtggatgactttggcgtctctgtcagcaacaccatctcccgggagtataatgaactgctcatggccatctcagacagtgactactacactgatgacatcaaccgggcctgtctgtttgttccctccatcgatgtgcttaaccagaacacactgcgcatcaaggagacagcacaagcgatggcccagctctctaggtgggatcgaggtacgaatcacctgttgttcaacatgttgcctggaggtcccccagattataacacagccctggatgtccccagagacagggccctgttggctggtggcggcttttctacgtggacttaccggcaaggctacgatgtcagcattcctgtctatagtccactgtcagctgaggtggatcttccagagaaaggaccaggtccacggcaatacttcctcctgtcatctcaggtgggtctccatcctgagtacagagaggacctagaagccctccaggtcaaacatggagagtcagtgttagtactcgataaatgcaccaacctctcagagggtgtcctttctgtccgtaagcgctgccacaagcaccaggtcttcgattacccacaggtgctacaggaggctactttctgtgtggttcttcgtggagctcggctgggccaggcagtattgagcgatgtgttacaagctggctgtgtcccggttgtcattgcagactcctatattttgcctttctctgaagttcttgactggaagagagcatctgtggttgtaccagaagaaaagatgtcagatgtgtacagtattttgcagagcatcccccaaagacagattgaagaaatgcagagacaggcccggtggttctgggaagcgtacttccagtcaattaaagccattgccctggccaccctgcagattatcaatgaccggatctatccatatgctgccatctcctatgaagaatggaatgaccctcctgctgtgaagtggggcagcgtgagcaatccactcttcctcccgctgatcccaccacagtctcaagggttcaccgccatagtcctcacctacgaccgagtagagagcctcttccgggtcatcactgaagtgtccaaggtgcccagtctatccaaactacttgtcgtctggaataatcagaataaaaaccctccagaagattctctctggcccaaaatccgggttccattaaaagttgtgaggactgctgaaaacaagttaagtaaccgtttcttcccttatgatgaaatcgagacagaagctgttctggccattgatgatgatatcattatgctgacctctgacgagctgcaatttggttatgaggtctggcgggaatttcctgaccggttggtgggttacccgggtcgtctgcatctctgggaccatgagatgaataagtggaagtatgagtctgagtggacgaatgaagtgtccatggtgctcactggggcagctttttatcacaagtattttaattacctgtatacctacaaaatgcctggggatatcaagaactgggtagatgctcatatgaactgtgaagatattgccatgaacttcctggtggccaacgtcacgggaaaagcagttatcaaggtaaccccacgaaagaaattcaagtgtcctgagtgcacagccatagatgggctttcactagaccaaacacacatggtggagaggtcagagtgcatcaacaagtttgcttcagtcttcgggaccatgcctctcaaggtggtggaacaccgagctgaccctgtcctgtacaaagatgactttcctgagaagctgaagagcttccccaacattggcagcttatgaaacgtgtcattggtggaggtctgaatgtgaggctgggacagagggagagaacaaggcctcccagcactctgatgtcagagtagtaggttaagggtggaaggttgacctacttggatcttggcatgcacccacctaacccactttctcaagaacaagaacctagaatgaatatccaagcacctcgagctatgcaacctctgttcttgtatttcttatgatctctgatgggttcttctcgaaaatgccaagtggaagactttgtggcatgctccagatttaaatccagctgaggctccctttgttttcagttccatgtaacaatctggaaggaaacttcacggacaggaagactgctggagaagagaagcgtgttagcccatttgaggtctggggaatcatgtaaagggtacccagacctcacttttagttatttacatcaatgagttctttcagggaaccaaacccagaattcggtgcaaaagccaaacatcttggtgggatttgataaatgccttgggacctggagtgctgggcttgtgcacaggaagagcaccagccgctgagtcaggatcctgtcagttccatgagctattcctctttggtttggctttttgatatgattaaaattattttttattcctttttctactgtgtcttaaacaccaattcctgatagtccaaggaaccacctttctcccttgatatatttaactccgtctttggcctgacaacagtcttctgcccatgtctgggaacacacgccaggaggaatgtctgataccctctgcatcaagcgtaagaaggtcccaaatcataaccattttaagaacagatgactcagaaacctccagaggaatctgtttgcttcctgattagatccagtcaatgttttaaaggtattgtcagagaaaaacagagggtctgtactagccatgcaaggagtcgctctagctggtacccgtaaaagttgtgggaattgtgacccccatcccaaggggatgccaaaatttctctcattcttttggtataaacttaacattagccagggaggttctggctaacgttaaatgctgctatacaactgctttgcaacagttgctggtatatttaaatcattaaatttcagcatttactaatactgcacatgtgtgaattatacctctttaagcccagttgatgaacaaatctaccctggcgaatgttaaatgttatggattcgaaacagatttatctggctctgatattaagattagccacagtttgggctttagccacaacatatgtccccaaaacacaaaatacataacaatttgcttagaatatggatataattacagaaacctagttgttttgccagtcagcgtcagtcatacaccatccattgttctgttgagtgacatgaaggtgggcagttattatgctgtagtttcatcaagagtcacttcagatgtgttccccagactttgagaggtcaaagaaagtttcagaagtagcaaagttggaagtggaaatcataagagttttgtcttctttcatttgaataagtgatcgaatcatggactattattgccaaagggggcaagcgatcatctcatccagtttgttcattttgcaaatgcagaaactgaagctgcagatgttcattttgcaaatgcagaaactgaagtgatttttttcagtttctgacagcagcaaacacaggtgcttaccaaatacttttgatttgggtaatgtgtactggtcagtaggagacatgggaaagcattttggtctcatgtattcataatattggggacgatatggtagaaagccaggaaaaatatttctgttgtcacccaggtaccagaggctgacaagcacagtgaggacctctaatctttctaggggttttctagtttgttttccaagatgtggggcaggtataggggagggtcttacattgaaatctctgctgaaagctatggactgtgctggcattgtgtatgtgtcatattgccctggtttcttcaaatttctgcccttttgctcatcatcgaatgcactaccttagtggctggtttctaatgcagcttctctcccaaagggtacatttttaaatttttattttttaaaatcttgagagtcctttgatttgggaagaggaactctttcatctgagttcattgtgagccctagagagctgtgtgactttatcatcgtcataggagtcattggactttaaaggcattacaactccatttaaagtacctcattactcccaggaatattgggtgttagatcttgcaacacagcataaaacaatttatgttaaagaaggagcattatatcctaggcacttgaaacaacctcaaaggtgatgttaccctatgaacagataggtggtacagtcaccgtagaaattcaagacagggatatagcaggtgatggcgattcatggattcagagtgggctagggactccactttattgttcgtgtatttctgagctgctaaccagcaaacctcacccataagcttaggtcaggatcatctgtcctcgggatgccatagagcctggtttcagaagcagaacaatcatgctaattaaaatgtcgtgttctggcctacagcagacaacagctggttttagattaagaaatctttttaaagaaacacatcttactggcctatagagaagacgaacttgaactggccctggcccaagtgcacactgagccactggctttgcccccaggggcctaactgggatgggcctgcttggaatgccagggctggaaatacttttttattttgctgattaacattacatagttgttaaaatgtttatctcatgtattttaccaaccctcacacatttaggtataaacctccttttctgggagaattaaagagaaaaacagcaactttagttgtcagaatcttgtgttctttcctgccagtgatgctctgctgtatccttttttttttttttttttttgagacagagtcttgctcttgtcacccaggctggagtgcaacaatagcatggtctcggctcactacatcctccgcctcccaggttcaagtgattctcctgcctcagcctcctgagtagctgggattacaggcgcttgccaccacgcctggctaatttgtttgtaattttagtagaggcagggtttcaccacgttagccaggctggtctcgaactcctgacctcaggtgatctgcacgccttgacctcccaaagtgctgggattacgggcgtgagtccccacgctcagccactgtatcctttactcagtgtcatcaagttcaaagctctgaccaccctggtttctctgccaaagcctcatctacttccagctgggctttgaacttgtggtttttaagtgctggtttctctgctgcctttggaaaatagtgaccatcatgctggtctgtgctgacgcagactgggagctggaagagacaagctccctctttgctctcattggccaaagatgttgctaataaccctgtgatcctagcttccttctaggatgatagcctctgacaggcaccatgccaggaggaaactagagcgtctttatcactgaaagatagcacgtttctagccacaggttctgaagttgatttgaggttaaaatccaagaacctttgatagttttcagccaagatagtaatcagaaagtagatgaagcagagactgggtttgggaagtggttgggttctgggaaggctcttcctagctctgcagttagatcctgtgaggacccagctgatagagtaaaggctttgggtgttggagacttcccatcagccacccatcatgagcctggtgtgtttcctttgctttgtagctcctttgggggtatgctgctttttccatttctcttggctcgggtactcttccattgcagcaagagaagccacagtgggctgttccccaagcagccctggcacagagaggcagagtagagaatgctaaactggccccatgtctcctccagccacttcctgaggagcagttctggcaggagtgttaaccatattggcagcagcttccatccagagagactttgaaagcaacttgagctttccactgcagggcctggaggcatatgaaacctgtggggcctgcccctactcacctcacccctgagctctgtccaagccctggacctcctgtcctcggcctgtgtttggtactcacccactttctacttctgagtagaatcaagggcagcatttggtcccattataccagccatgcatcatctgtgaacaggccttattgagcttatcttggcagaggaaagtcaggcaggcaagacccactctaaattttaatgtttccccctcattttagggtgggagctgtgagttcatctgaagactgggtgagggcattgtaagctcaagccacagcctcttttccacctccattaaatggactgttagggatgcccagcttccccaatttcctgggagggtgtgtgggtctgtacaggcaaccttgtgtcattctttcaatttccggctcaccattgctggcaacagtgggaagatgaccagagaaagtttggccccctctcccaagcttccaggcctctttccttttcaagaaatagttgagtcaccagcatctgtatctggcattttgtttcttcacatttgcaaccatttcagggtagagtttttttgtttgtttgtttgtttgtttttgttttttttgttttttctttggaaacagagtctcactctgtcccataggctggagtgtagtgctgtgatcatggctcgctgcagcctcaaactcctggactcaagcagtcttcccatctcagccttccaagtagctgagactaaaagcgtgcaccaccacacctggctgatcttttaatttttttggagagacagggcctcactatgttgcctaggctggtctctaactcctgggatcaagtgatcctcctgcctcagcgtcccaaagtgttgggattacaggtgtgaaccaccatgcctggcccaggatagcactttttcctttcttctgctctcagttggttggaccactggttgcatctcttcccactctccctgaaaggcacagaactatcagacagaagacaaggtagttctcaagaagtaccaggcagctgtgtctgctagaggcttcctcagcaaagccccatcttgtggacaacctctcaggaattgcaggtggtgtgggagtggctgacagaggagggatccatatgtcttagaccaaagccaccagtcaggccttgccaccatatagaaccttccctttagaatatatttatttggaattttacttatagctgcaaatatatcattggctactatacccaagcatcaactcaaggaacatttggttttctggtgagcacagctgaagaccaaccaactagttactgatccagatgagggaagagaacatttattcagtcattctgttatgctaactattcattttctcatgaaaatgtagtctttggctgggcatggtggctcatgcctgtaatcccagcattttgggaggccaaagcgggcagatcatgaggtcacgagatcgagaccctcctggctaacacggtgaaaccccatctctactaaaaatacaaagaattagccgggcatagtggcaggcacctgtagccccagctactcgggaggctgaggcaggagaatggcgtgaacctgagaggtggagcttgcagtgagctgagattgtgccactacactccagcctgggcgacagagcaagactccgtctcaaaagagaaaatgttgtctttgccaggcagtgtggtaggcccaagagatatagcaattagagttgactaagacagtgtccctatcctgttcttgagctccagttctagtgggagttcttgagcttggtaagatgatgtgagtccatcagtggcccaggactctaagcatgtatgttttagtcccagctgtaaatgaggattccattaaccccatcttctccaatgtatggaggatgcaagaagctttaaaatgtccttttctcacagtgacttcccttgaccatgccttagtttcctcagccagaaattggagacagcaagagcacttatgcctgagttggtgagatggaatgatgtatcatatctcttccccttttattaaccagatcgtttaccagattgtacctggtgatgctggcagccagccctcttccggcccctatttctgcttaccgtgttaccagagagcctgggggtctggatcctatctggccccgtcagggtggattaccaaatgagcagttctcttgccccagtccctttcctgtgctataaataagccccatgtttattttcttatgttattgaaatgagcacttgtgatttgggcctcttttgaggagtccagagagcgtccatccggtgcctggtgagggccctgcatggctggctgctgtctgaagctatttggagtcctctccctgtgttttctatgtggcttaatttcaatagaaagggttatatgcaaccctgtatctgctgattttcaggtttcaactttctgccagcgtcactgcctgcttagaagtaaagttatgtttctcattaaggggataacagccacaattgaggtaattaacgaaaattgtacattggtggcagcacctcctataggatttccaatagtctttctctagtagatcattgggggctcaccttgatctcctctcttctgtctaccctgcaccaaaataccttgtcctgttttctggatatagttccaataatttttttcctaacagcctttttgtcaccagttggtttgatatcttacaacttggccaaatgagggttccattaactccatcttgtctaatgcatggagaattcaaggattttttttttctcttttcatagcaccttccagttgccagttgtaccctggcccttctttggaagtcataatgatgaatatccattaataagagattgatgctctttcaactctcatgtcatctataccatctcagtggagaggatgactttggatgaggttggaatagaaaggaaacatttggaagtccactgcagtgtattatatgctgtgtggaagtctgggggttaggaaatacctggagggagaacttcctaagaaatgatttttggttcttttaggccttaacagcacaataaaagtatcccatgagaccattatgagcaggacacgacattgtttcacaccttgggctgtgactatttacttctcggtacagattactctggttaaatcactcagtaaagaaatcttttcatgctcacaatctgaacctgaaggctattactgaagagaattgcatctgacaacaaaatttaatttacttccagagaaaggaccagaagaaagtaaattttcatttatgtttttaagtctattgtcttaaaaagattcttttcccttaaaaaataaaaaaacctgatgtgatgggttccttcagtcaacaaatacttattgagcagttattgtgtgccagatactgttcttggtgtgaggatatggcactgaacaaaacaatgtacctactttcgtcaagcttacattctaatgaggaagataaccaaaacaagtgactgaatataatttcaaatgtcaataaatgctgtgaagaaaataaa

SEQ ID NO: 18 - DNA, 9986 bp, Homo sapiens
  misc_feature 1..9986: note = Reverse Complement of SEQ ID NO:17
  source 1..9986: mol_type = genomic DNA
tttattttcttcacagcatttattgacatttgaaattatattcagtcacttgttttggttatcttcctcattagaatgtaagcttgacgaaagtaggtacattgttttgttcagtgccatatcctcacaccaagaacagtatctggcacacaataactgctcaataagtatttgttgactgaaggaacccatcacatcaggtttttttattttttaagggaaaagaatctttttaagacaatagacttaaaaacataaatgaaaatttactttcttctggtcctttctctggaagtaaattaaattttgttgtcagatgcaattctcttcagtaatagccttcaggttcagattgtgagcatgaaaagatttctttactgagtgatttaaccagagtaatctgtaccgagaagtaaatagtcacagcccaaggtgtgaaacaatgtcgtgtcctgctcataatggtctcatgggatacttttattgtgctgttaaggcctaaaagaaccaaaaatcatttcttaggaagttctccctccaggtatttcctaacccccagacttccacacagcatataatacactgcagtggacttccaaatgtttcctttctattccaacctcatccaaagtcatcctctccactgagatggtatagatgacatgagagttgaaagagcatcaatctcttattaatggatattcatcattatgacttccaaagaagggccagggtacaactggcaactggaaggtgctatgaaaagagaaaaaaaaaatccttgaattctccatgcattagacaagatggagttaatggaaccctcatttggccaagttgtaagatatcaaaccaactggtgacaaaaaggctgttaggaaaaaaattattggaactatatccagaaaacaggacaaggtattttggtgcagggtagacagaagagaggagatcaaggtgagcccccaatgatctactagagaaagactattggaaatcctataggaggtgctgccaccaatgtacaattttcgttaattacctcaattgtggctgttatccccttaatgagaaacataactttacttctaagcaggcagtgacgctggcagaaagttgaaacctgaaaatcagcagatacagggttgcatataaccctttctattgaaattaagccacatagaaaacacagggagaggactccaaatagcttcagacagcagccagccatgcagggccctcaccaggcaccggatggacgctctctggactcctcaaaagaggcccaaatcacaagtgctcatttcaataacataagaaaataaacatggggcttatttatagcacaggaaagggactggggcaagagaactgctcatttggtaatccaccctgacggggccagataggatccagacccccaggctctctggtaacacggtaagcagaaataggggccggaagagggctggctgccagcatcaccaggtacaatctggtaaacgatctggttaataaaaggggaagagatatgatacatcattccatctcaccaactcaggcataagtgctcttgctgtctccaatttctggctgaggaaactaaggcatggtcaagggaagtcactgtgagaaaaggacattttaaagcttcttgcatcctccatacattggagaagatggggttaatggaatcctcatttacagctgggactaaaacatacatgcttagagtcctgggccactgatggactcacatcatcttaccaagctcaagaactcccactagaactggagctcaagaacaggatagggacactgtcttagtcaactctaattgctatatctcttgggcctaccacactgcctggcaaagacaacattttctcttttgagacggagtcttgctctgtcgcccaggctggagtgtagtggcacaatctcagctcactgcaagctccacctctcaggttcacgccattctcctgcctcagcctcccgagtagctggggctacaggtgcctgccactatgcccggctaattctttgtatttttagtagagatggggtttcaccgtgttagccaggagggtctcgatctcgtgacctcatgatctgcccgctttggcctcccaaaatgctgggattacaggcatgagccaccatgcccagccaaagactacattttcatgagaaaatgaatagttagcataacagaatgactgaataaatgttctcttccctcatctggatcagtaactagttggttggtcttcagctgtgctcaccagaaaaccaaatgttccttgagttgatgcttgggtatagtagccaatgatatatttgcagctataagtaaaattccaaataaatatattctaaagggaaggttctatatggtggcaaggcctgactggtggctttggtctaagacatatggatccctcctctgtcagccactcccacaccacctgcaattcctgagaggttgtccacaagatggggctttgctgaggaagcctctagcagacacagctgcctggtacttcttgagaactaccttgtcttctgtctgatagttctgtgcctttcagggagagtgggaagagatgcaaccagtggtccaaccaactgagagcagaagaaaggaaaaagtgctatcctgggccaggcatggtggttcacacctgtaatcccaacactttgggacgctgaggcaggaggatcacttgatcccaggagttagagaccagcctaggcaacatagtgaggccctgtctctccaaaaaaattaaaagatcagccaggtgtggtggtgcacgcttttagtctcagctacttggaaggctgagatgggaagactgcttgagtccaggagtttgaggctgcagcgagccatgatcacagcactacactccagcctatgggacagagtgagactctgtttccaaagaaaaaacaaaaaaaacaaaaacaaacaaacaaacaaacaaaaaaactctaccctgaaatggttgcaaatgtgaagaaacaaaatgccagatacagatgctggtgactcaactatttcttgaaaaggaaagaggcctggaagcttgggagagggggccaaactttctctggtcatcttcccactgttgccagcaatggtgagccggaaattgaaagaatgacacaaggttgcctgtacagacccacacaccctcccaggaaattggggaagctgggcatccctaacagtccatttaatggaggtggaaaagaggctgtggcttgagcttacaatgccctcacccagtcttcagatgaactcacagctcccaccctaaaatgagggggaaacattaaaatttagagtgggtcttgcctgcctgactttcctctgccaagataagctcaataaggcctgttcacagatgatgcatggctggtataatgggaccaaatgctgcccttgattctactcagaagtagaaagtgggtgagtaccaaacacaggccgaggacaggaggtccagggcttggacagagctcaggggtgaggtgagtaggggcaggccccacaggtttcatatgcctccaggccctgcagtggaaagctcaagttgctttcaaagtctctctggatggaagctgctgccaatatggttaacactcctgccagaactgctcctcaggaagtggctggaggagacatggggccagtttagcattctctactctgcctctctgtgccagggctgcttggggaacagcccactgtggcttctcttgctgcaatggaagagtacccgagccaagagaaatggaaaaagcagcatacccccaaaggagctacaaagcaaaggaaacacaccaggctcatgatgggtggctgatgggaagtctccaacacccaaagcctttactctatcagctgggtcctcacaggatctaactgcagagctaggaagagccttcccagaacccaaccacttcccaaacccagtctctgcttcatctactttctgattactatcttggctgaaaactatcaaaggttcttggattttaacctcaaatcaacttcagaacctgtggctagaaacgtgctatctttcagtgataaagacgctctagtttcctcctggcatggtgcctgtcagaggctatcatcctagaaggaagctaggatcacagggttattagcaacatctttggccaatgagagcaaagagggagcttgtctcttccagctcccagtctgcgtcagcacagaccagcatgatggtcactattttccaaaggcagcagagaaaccagcacttaaaaaccacaagttcaaagcccagctggaagtagatgaggctttggcagagaaaccagggtggtcagagctttgaacttgatgacactgagtaaaggatacagtggctgagcgtggggactcacgcccgtaatcccagcactttgggaggtcaaggcgtgcagatcacctgaggtcaggagttcgagaccagcctggctaacgtggtgaaaccctgcctctactaaaattacaaacaaattagccaggcgtggtggcaagcgcctgtaatcccagctactcaggaggctgaggcaggagaatcacttgaacctgggaggcggaggatgtagtgagccgagaccatgctattgttgcactccagcctgggtgacaagagcaagactctgtctcaaaaaaaaaaaaaaaaaaaaggatacagcagagcatcactggcaggaaagaacacaagattctgacaactaaagttgctgtttttctctttaattctcccagaaaaggaggtttatacctaaatgtgtgagggttggtaaaatacatgagataaacattttaacaactatgtaatgttaatcagcaaaataaaaaagtatttccagccctggcattccaagcaggcccatcccagttaggcccctgggggcaaagccagtggctcagtgtgcacttgggccagggccagttcaagttcgtcttctctataggccagtaagatgtgtttctttaaaaagatttcttaatctaaaaccagctgttgtctgctgtaggccagaacacgacattttaattagcatgattgttctgcttctgaaaccaggctctatggcatcccgaggacagatgatcctgacctaagcttatgggtgaggtttgctggttagcagctcagaaatacacgaacaataaagtggagtccctagcccactctgaatccatgaatcgccatcacctgctatatccctgtcttgaatttctacggtgactgtaccacctatctgttcatagggtaacatcacctttgaggttgtttcaagtgcctaggatataatgctccttctttaacataaattgttttatgctgtgttgcaagatctaacacccaatattcctgggagtaatgaggtactttaaatggagttgtaatgcctttaaagtccaatgactcctatgacgatgataaagtcacacagctctctagggctcacaatgaactcagatgaaagagttcctcttcccaaatcaaaggactctcaagattttaaaaaataaaaatttaaaaatgtaccctttgggagagaagctgcattagaaaccagccactaaggtagtgcattcgatgatgagcaaaagggcagaaatttgaagaaaccagggcaatatgacacatacacaatgccagcacagtccatagctttcagcagagatttcaatgtaagaccctcccctatacctgccccacatcttggaaaacaaactagaaaacccctagaaagattagaggtcctcactgtgcttgtcagcctctggtacctgggtgacaacagaaatatttttcctggctttctaccatatcgtccccaatattatgaatacatgagaccaaaatgctttcccatgtctcctactgaccagtacacattacccaaatcaaaagtatttggtaagcacctgtgtttgctgctgtcagaaactgaaaaaaatcacttcagtttctgcatttgcaaaatgaacatctgcagcttcagtttctgcatttgcaaaatgaacaaactggatgagatgatcgcttgccccctttggcaataatagtccatgattcgatcacttattcaaatgaaagaagacaaaactcttatgatttccacttccaactttgctacttctgaaactttctttgacctctcaaagtctggggaacacatctgaagtgactcttgatgaaactacagcataataactgcccaccttcatgtcactcaacagaacaatggatggtgtatgactgacgctgactggcaaaacaactaggtttctgtaattatatccatattctaagcaaattgttatgtattttgtgttttggggacatatgttgtggctaaagcccaaactgtggctaatcttaatatcagagccagataaatctgtttcgaatccataacatttaacattcgccagggtagatttgttcatcaactgggcttaaagaggtataattcacacatgtgcagtattagtaaatgctgaaatttaatgatttaaatataccagcaactgttgcaaagcagttgtatagcagcatttaacgttagccagaacctccctggctaatgttaagtttataccaaaagaatgagagaaattttggcatccccttgggatgggggtcacaattcccacaacttttacgggtaccagctagagcgactccttgcatggctagtacagaccctctgtttttctctgacaatacctttaaaacattgactggatctaatcaggaagcaaacagattcctctggaggtttctgagtcatctgttcttaaaatggttatgatttgggaccttcttacgcttgatgcagagggtatcagacattcctcctggcgtgtgttcccagacatgggcagaagactgttgtcaggccaaagacggagttaaatatatcaagggagaaaggtggttccttggactatcaggaattggtgtttaagacacagtagaaaaaggaataaaaaataattttaatcatatcaaaaagccaaaccaaagaggaatagctcatggaactgacaggatcctgactcagcggctggtgctcttcctgtgcacaagcccagcactccaggtcccaaggcatttatcaaatcccaccaagatgtttggcttttgcaccgaattctgggtttggttccctgaaagaactcattgatgtaaataactaaaagtgaggtctgggtaccctttacatgattccccagacctcaaatgggctaacacgcttctcttctccagcagtcttcctgtccgtgaagtttccttccagattgttacatggaactgaaaacaaagggagcctcagctggatttaaatctggagcatgccacaaagtcttccacttggcattttcgagaagaacccatcagagatcataagaaatacaagaacagaggttgcatagctcgaggtgcttggatattcattctaggttcttgttcttgagaaagtgggttaggtgggtgcatgccaagatccaagtaggtcaaccttccacccttaacctactactctgacatcagagtgctgggaggccttgttctctccctctgtcccagcctcacattcagacctccaccaatgacacgtttcataagctgccaatgttggggaagctcttcagcttctcaggaaagtcatctttgtacaggacagggtcagctcggtgttccaccaccttgagaggcatggtcccgaagactgaagcaaacttgttgatgcactctgacctctccaccatgtgtgtttggtctagtgaaagcccatctatggctgtgcactcaggacacttgaatttctttcgtggggttaccttgataactgcttttcccgtgacgttggccaccaggaagttcatggcaatatcttcacagttcatatgagcatctacccagttcttgatatccccaggcattttgtaggtatacaggtaattaaaatacttgtgataaaaagctgccccagtgagcaccatggacacttcattcgtccactcagactcatacttccacttattcatctcatggtcccagagatgcagacgacccgggtaacccaccaaccggtcaggaaattcccgccagacctcataaccaaattgcagctcgtcagaggtcagcataatgatatcatcatcaatggccagaacagcttctgtctcgatttcatcataagggaagaaacggttacttaacttgttttcagcagtcctcacaacttttaatggaacccggattttgggccagagagaatcttctggagggtttttattctgattattccagacgacaagtagtttggatagactgggcaccttggacacttcagtgatgacccggaagaggctctctactcggtcgtaggtgaggactatggcggtgaacccttgagactgtggtgggatcagcgggaggaagagtggattgctcacgctgccccacttcacagcaggagggtcattccattcttcataggagatggcagcatatggatagatccggtcattgataatctgcagggtggccagggcaatggctttaattgactggaagtacgcttcccagaaccaccgggcctgtctctgcatttcttcaatctgtctttgggggatgctctgcaaaatactgtacacatctgacatcttttcttctggtacaaccacagatgctctcttccagtcaagaacttcagagaaaggcaaaatataggagtctgcaatgacaaccgggacacagccagcttgtaacacatcgctcaatactgcctggcccagccgagctccacgaagaaccacacagaaagtagcctcctgtagcacctgtgggtaatcgaagacctggtgcttgtggcagcgcttacggacagaaaggacaccctctgagaggttggtgcatttatcgagtactaacactgactctccatgtttgacctggagggcttctaggtcctctctgtactcaggatggagacccacctgagatgacaggaggaagtattgccgtggacctggtcctttctctggaagatccacctcagctgacagtggactatagacaggaatgctgacatcgtagccttgccggtaagtccacgtagaaaagccgccaccagccaacagggccctgtctctggggacatccagggctgtgttataatctgggggacctccaggcaacatgttgaacaacaggtgattcgtacctcgatcccacctagagagctgggccatcgcttgtgctgtctccttgatgcgcagtgtgttctggttaagcacatcgatggagggaacaaacagacaggcccggttgatgtcatcagtgtagtagtcactgtctgagatggccatgagcagttcattatactcccgggagatggtgttgctgacagagacgccaaagtcatccacgtactttttcagagcatagatatacaccttgattttgttctttgggttgaagccacagcgatagacatcaaaacacgtgtgcattctgcaactgagatccccccgctctgggatgggactgtcggctggcagcctaacaaccggcacatcacggatgctgcgcttctctacattccagtcatttgaggactcgatagaatggggccaaaactgaaacatgccagtggcaatgaggcccaggaggacaatggagaagagggtgatatagtagattcggtgcttggtcttcattcttgggatgagggcaggaccccggatattatacttgaccgacgcacacataatgacacagacagcctcttcctcacactcctcgtcccacggcttctggcaccgcaagggatgccgcaggccaccaccggaccctgaggcgcaggacatccccctgggaggaatcagatccctgtggctggcgggaaggtggcagcaggaaggg

SEQ ID NO: 19 - DNA, 10076 bp, Homo sapiens
  misc_feature 1..10076: note = >NM_001389630.1 Homo sapiens exostosin glycosyltransferase 2 (EXT2), transcript variant 5, mRNA
  source 1..10076: mol_type = genomic DNA
agacggcccggatcccggttaccggcccctcgctcgctgctcgccagcccagactcggccctggcagtggcggctggcgattcggaccgatccgacctgggcggaggtggcccgcgccccgcggcatgagccggtgaccaagctcggggccgagcgggaggcagccgtggccgagagctactcagagttgctgtttctccttgagatgcttttggagtgtgaggaagaggctgtctgtgtcattatgtgtgcgtcggtcaagtataatatccggggtcctgccctcatcccaagaatgaagaccaagcaccgaatctactatatcaccctcttctccattgtcctcctgggcctcattgccactggcatgtttcagttttggccccattctatcgagtcctcaaatgactggaatgtagagaagcgcagcatccgtgatgtgccggttgttaggctgccagccgacagtcccatcccagagcggggggatctcagttgcagaatgcacacgtgttttgatgtctatcgctgtggcttcaacccaaagaacaaaatcaaggtgtatatctatgctctgaaaaagtacgtggatgactttggcgtctctgtcagcaacaccatctcccgggagtataatgaactgctcatggccatctcagacagtgactactacactgatgacatcaaccgggcctgtctgtttgttccctccatcgatgtgcttaaccagaacacactgcgcatcaaggagacagcacaagcgatggcccagctctctaggtgggatcgaggtacgaatcacctgttgttcaacatgttgcctggaggtcccccagattataacacagccctggatgtccccagagacagggccctgttggctggtggcggcttttctacgtggacttaccggcaaggctacgatgtcagcattcctgtctatagtccactgtcagctgaggtggatcttccagagaaaggaccaggtccacggcaatacttcctcctgtcatctcaggtgggtctccatcctgagtacagagaggacctagaagccctccaggtcaaacatggagagtcagtgttagtactcgataaatgcaccaacctctcagagggtgtcctttctgtccgtaagcgctgccacaagcaccaggtcttcgattacccacaggtgctacaggaggctactttctgtgtggttcttcgtggagctcggctgggccaggcagtattgagcgatgtgttacaagctggctgtgtcccggttgtcattgcagactcctatattttgcctttctctgaagttcttgactggaagagagcatctgtggttgtaccagaagaaaagatgtcagatgtgtacagtattttgcagagcatcccccaaagacagattgaagaaatgcagagacaggcccggtggttctgggaagcgtacttccagtcaattaaagccattgccctggccaccctgcagattatcaatgaccggatctatccatatgctgccatctcctatgaagaatggaatgaccctcctgctgtgaagtggggcagcgtgagcaatccactcttcctcccgctgatcccaccacagtctcaagggttcaccgccatagtcctcacctacgaccgagtagagagcctcttccgggtcatcactgaagtgtccaaggtgcccagtctatccaaactacttgtcgtctggaataatcagaataaaaaccctccagaagattctctctggcccaaaatccgggttccattaaaagttgtgaggactgctgaaaacaagttaagtaaccgtttcttcccttatgatgaaatcgagacagaagctgttctggccattgatgatgatatcattatgctgacctctgacgagctgcaatttggttatgaggtctggcgggaatttcctgaccggttggtgggttacccgggtcgtctgcatctctgggaccatgagatgaataagtggaagtatgagtctgagtggacgaatgaagtgtccatggtgctcactggggcagctttttatcacaagtattttaattacctgtatacctacaaaatgcctggggatatcaagaactgggtagatgctcatatgaactgtgaagatattgccatgaacttcctggtggccaacgtcacgggaaaagcagttatcaaggtaaccccacgaaagaaattcaagtgtcctgagtgcacagccatagatgggctttcactagaccaaacacacatggtggagaggtcagagtgcatcaacaagtttgcttcagtcttcgggaccatgcctctcaaggtggtggaacaccgagctgaccctgtcctgtacaaagatgactttcctgagaagctgaagagcttccccaacattggcagcttatgaaacgtgtcattggtggaggtctgaatgtgaggctgggacagagggagagaacaaggcctcccagcactctgatgtcagagtagtaggttaagggtggaaggttgacctacttggatcttggcatgcacccacctaacccactttctcaagaacaagaacctagaatgaatatccaagcacctcgagctatgcaacctctgttcttgtatttcttatgatctctgatgggttcttctcgaaaatgccaagtggaagactttgtggcatgctccagatttaaatccagctgaggctccctttgttttcagttccatgtaacaatctggaaggaaacttcacggacaggaagactgctggagaagagaagcgtgttagcccatttgaggtctggggaatcatgtaaagggtacccagacctcacttttagttatttacatcaatgagttctttcagggaaccaaacccagaattcggtgcaaaagccaaacatcttggtgggatttgataaatgccttgggacctggagtgctgggcttgtgcacaggaagagcaccagccgctgagtcaggatcctgtcagttccatgagctattcctctttggtttggctttttgatatgattaaaattattttttattcctttttctactgtgtcttaaacaccaattcctgatagtccaaggaaccacctttctcccttgatatatttaactccgtctttggcctgacaacagtcttctgcccatgtctgggaacacacgccaggaggaatgtctgataccctctgcatcaagcgtaagaaggtcccaaatcataaccattttaagaacagatgactcagaaacctccagaggaatctgtttgcttcctgattagatccagtcaatgttttaaaggtattgtcagagaaaaacagagggtctgtactagccatgcaaggagtcgctctagctggtacccgtaaaagttgtgggaattgtgacccccatcccaaggggatgccaaaatttctctcattcttttggtataaacttaacattagccagggaggttctggctaacgttaaatgctgctatacaactgctttgcaacagttgctggtatatttaaatcattaaatttcagcatttactaatactgcacatgtgtgaattatacctctttaagcccagttgatgaacaaatctaccctggcgaatgttaaatgttatggattcgaaacagatttatctggctctgatattaagattagccacagtttgggctttagccacaacatatgtccccaaaacacaaaatacataacaatttgcttagaatatggatataattacagaaacctagttgttttgccagtcagcgtcagtcatacaccatccattgttctgttgagtgacatgaaggtgggcagttattatgctgtagtttcatcaagagtcacttcagatgtgttccccagactttgagaggtcaaagaaagtttcagaagtagcaaagttggaagtggaaatcataagagttttgtcttctttcatttgaataagtgatcgaatcatggactattattgccaaagggggcaagcgatcatctcatccagtttgttcattttgcaaatgcagaaactgaagctgcagatgttcattttgcaaatgcagaaactgaagtgatttttttcagtttctgacagcagcaaacacaggtgcttaccaaatacttttgatttgggtaatgtgtactggtcagtaggagacatgggaaagcattttggtctcatgtattcataatattggggacgatatggtagaaagccaggaaaaatatttctgttgtcacccaggtaccagaggctgacaagcacagtgaggacctctaatctttctaggggttttctagtttgttttccaagatgtggggcaggtataggggagggtcttacattgaaatctctgctgaaagctatggactgtgctggcattgtgtatgtgtcatattgccctggtttcttcaaatttctgcccttttgctcatcatcgaatgcactaccttagtggctggtttctaatgcagcttctctcccaaagggtacatttttaaatttttattttttaaaatcttgagagtcctttgatttgggaagaggaactctttcatctgagttcattgtgagccctagagagctgtgtgactttatcatcgtcataggagtcattggactttaaaggcattacaactccatttaaagtacctcattactcccaggaatattgggtgttagatcttgcaacacagcataaaacaatttatgttaaagaaggagcattatatcctaggcacttgaaacaacctcaaaggtgatgttaccctatgaacagataggtggtacagtcaccgtagaaattcaagacagggatatagcaggtgatggcgattcatggattcagagtgggctagggactccactttattgttcgtgtatttctgagctgctaaccagcaaacctcacccataagcttaggtcaggatcatctgtcctcgggatgccatagagcctggtttcagaagcagaacaatcatgctaattaaaatgtcgtgttctggcctacagcagacaacagctggttttagattaagaaatctttttaaagaaacacatcttactggcctatagagaagacgaacttgaactggccctggcccaagtgcacactgagccactggctttgcccccaggggcctaactgggatgggcctgcttggaatgccagggctggaaatacttttttattttgctgattaacattacatagttgttaaaatgtttatctcatgtattttaccaaccctcacacatttaggtataaacctccttttctgggagaattaaagagaaaaacagcaactttagttgtcagaatcttgtgttctttcctgccagtgatgctctgctgtatccttttttttttttttttttttgagacagagtcttgctcttgtcacccaggctggagtgcaacaatagcatggtctcggctcactacatcctccgcctcccaggttcaagtgattctcctgcctcagcctcctgagtagctgggattacaggcgcttgccaccacgcctggctaatttgtttgtaattttagtagaggcagggtttcaccacgttagccaggctggtctcgaactcctgacctcaggtgatctgcacgccttgacctcccaaagtgctgggattacgggcgtgagtccccacgctcagccactgtatcctttactcagtgtcatcaagttcaaagctctgaccaccctggtttctctgccaaagcctcatctacttccagctgggctttgaacttgtggtttttaagtgctggtttctctgctgcctttggaaaatagtgaccatcatgctggtctgtgctgacgcagactgggagctggaagagacaagctccctctttgctctcattggccaaagatgttgctaataaccctgtgatcctagcttccttctaggatgatagcctctgacaggcaccatgccaggaggaaactagagcgtctttatcactgaaagatagcacgtttctagccacaggttctgaagttgatttgaggttaaaatccaagaacctttgatagttttcagccaagatagtaatcagaaagtagatgaagcagagactgggtttgggaagtggttgggttctgggaaggctcttcctagctctgcagttagatcctgtgaggacccagctgatagagtaaaggctttgggtgttggagacttcccatcagccacccatcatgagcctggtgtgtttcctttgctttgtagctcctttgggggtatgctgctttttccatttctcttggctcgggtactcttccattgcagcaagagaagccacagtgggctgttccccaagcagccctggcacagagaggcagagtagagaatgctaaactggccccatgtctcctccagccacttcctgaggagcagttctggcaggagtgttaaccatattggcagcagcttccatccagagagactttgaaagcaacttgagctttccactgcagggcctggaggcatatgaaacctgtggggcctgcccctactcacctcacccctgagctctgtccaagccctggacctcctgtcctcggcctgtgtttggtactcacccactttctacttctgagtagaatcaagggcagcatttggtcccattataccagccatgcatcatctgtgaacaggccttattgagcttatcttggcagaggaaagtcaggcaggcaagacccactctaaattttaatgtttccccctcattttagggtgggagctgtgagttcatctgaagactgggtgagggcattgtaagctcaagccacagcctcttttccacctccattaaatggactgttagggatgcccagcttccccaatttcctgggagggtgtgtgggtctgtacaggcaaccttgtgtcattctttcaatttccggctcaccattgctggcaacagtgggaagatgaccagagaaagtttggccccctctcccaagcttccaggcctctttccttttcaagaaatagttgagtcaccagcatctgtatctggcattttgtttcttcacatttgcaaccatttcagggtagagtttttttgtttgtttgtttgtttgtttttgttttttttgttttttctttggaaacagagtctcactctgtcccataggctggagtgtagtgctgtgatcatggctcgctgcagcctcaaactcctggactcaagcagtcttcccatctcagccttccaagtagctgagactaaaagcgtgcaccaccacacctggctgatcttttaatttttttggagagacagggcctcactatgttgcctaggctggtctctaactcctgggatcaagtgatcctcctgcctcagcgtcccaaagtgttgggattacaggtgtgaaccaccatgcctggcccaggatagcactttttcctttcttctgctctcagttggttggaccactggttgcatctcttcccactctccctgaaaggcacagaactatcagacagaagacaaggtagttctcaagaagtaccaggcagctgtgtctgctagaggcttcctcagcaaagccccatcttgtggacaacctctcaggaattgcaggtggtgtgggagtggctgacagaggagggatccatatgtcttagaccaaagccaccagtcaggccttgccaccatatagaaccttccctttagaatatatttatttggaattttacttatagctgcaaatatatcattggctactatacccaagcatcaactcaaggaacatttggttttctggtgagcacagctgaagaccaaccaactagttactgatccagatgagggaagagaacatttattcagtcattctgttatgctaactattcattttctcatgaaaatgtagtctttggctgggcatggtggctcatgcctgtaatcccagcattttgggaggccaaagcgggcagatcatgaggtcacgagatcgagaccctcctggctaacacggtgaaaccccatctctactaaaaatacaaagaattagccgggcatagtggcaggcacctgtagccccagctactcgggaggctgaggcaggagaatggcgtgaacctgagaggtggagcttgcagtgagctgagattgtgccactacactccagcctgggcgacagagcaagactccgtctcaaaagagaaaatgttgtctttgccaggcagtgtggtaggcccaagagatatagcaattagagttgactaagacagtgtccctatcctgttcttgagctccagttctagtgggagttcttgagcttggtaagatgatgtgagtccatcagtggcccaggactctaagcatgtatgttttagtcccagctgtaaatgaggattccattaaccccatcttctccaatgtatggaggatgcaagaagctttaaaatgtccttttctcacagtgacttcccttgaccatgccttagtttcctcagccagaaattggagacagcaagagcacttatgcctgagttggtgagatggaatgatgtatcatatctcttccccttttattaaccagatcgtttaccagattgtacctggtgatgctggcagccagccctcttccggcccctatttctgcttaccgtgttaccagagagcctgggggtctggatcctatctggccccgtcagggtggattaccaaatgagcagttctcttgccccagtccctttcctgtgctataaataagccccatgtttattttcttatgttattgaaatgagcacttgtgatttgggcctcttttgaggagtccagagagcgtccatccggtgcctggtgagggccctgcatggctggctgctgtctgaagctatttggagtcctctccctgtgttttctatgtggcttaatttcaatagaaagggttatatgcaaccctgtatctgctgattttcaggtttcaactttctgccagcgtcactgcctgcttagaagtaaagttatgtttctcattaaggggataacagccacaattgaggtaattaacgaaaattgtacattggtggcagcacctcctataggatttccaatagtctttctctagtagatcattgggggctcaccttgatctcctctcttctgtctaccctgcaccaaaataccttgtcctgttttctggatatagttccaataatttttttcctaacagcctttttgtcaccagttggtttgatatcttacaacttggccaaatgagggttccattaactccatcttgtctaatgcatggagaattcaaggattttttttttctcttttcatagcaccttccagttgccagttgtaccctggcccttctttggaagtcataatgatgaatatccattaataagagattgatgctctttcaactctcatgtcatctataccatctcagtggagaggatgactttggatgaggttggaatagaaaggaaacatttggaagtccactgcagtgtattatatgctgtgtggaagtctgggggttaggaaatacctggagggagaacttcctaagaaatgatttttggttcttttaggccttaacagcacaataaaagtatcccatgagaccattatgagcaggacacgacattgtttcacaccttgggctgtgactatttacttctcggtacagattactctggttaaatcactcagtaaagaaatcttttcatgctcacaatctgaacctgaaggctattactgaagagaattgcatctgacaacaaaatttaatttacttccagagaaaggaccagaagaaagtaaattttcatttatgtttttaagtctattgtcttaaaaagattcttttcccttaaaaaataaaaaaacctgatgtgatgggttccttcagtcaacaaatacttattgagcagttattgtgtgccagatactgttcttggtgtgaggatatggcactgaacaaaacaatgtacctactttcgtcaagcttacattctaatgaggaagataaccaaaacaagtgactgaatataatttcaaatgtcaataaatgctgtgaagaaaataaa

SEQ ID NO: 20 - DNA, 10076 bp, Homo sapiens
  misc_feature 1..10076: note = Reverse Complement of SEQ ID NO:19
  source 1..10076: mol_type = genomic DNA
tttattttcttcacagcatttattgacatttgaaattatattcagtcacttgttttggttatcttcctcattagaatgtaagcttgacgaaagtaggtacattgttttgttcagtgccatatcctcacaccaagaacagtatctggcacacaataactgctcaataagtatttgttgactgaaggaacccatcacatcaggtttttttattttttaagggaaaagaatctttttaagacaatagacttaaaaacataaatgaaaatttactttcttctggtcctttctctggaagtaaattaaattttgttgtcagatgcaattctcttcagtaatagccttcaggttcagattgtgagcatgaaaagatttctttactgagtgatttaaccagagtaatctgtaccgagaagtaaatagtcacagcccaaggtgtgaaacaatgtcgtgtcctgctcataatggtctcatgggatacttttattgtgctgttaaggcctaaaagaaccaaaaatcatttcttaggaagttctccctccaggtatttcctaacccccagacttccacacagcatataatacactgcagtggacttccaaatgtttcctttctattccaacctcatccaaagtcatcctctccactgagatggtatagatgacatgagagttgaaagagcatcaatctcttattaatggatattcatcattatgacttccaaagaagggccagggtacaactggcaactggaaggtgctatgaaaagagaaaaaaaaaatccttgaattctccatgcattagacaagatggagttaatggaaccctcatttggccaagttgtaagatatcaaaccaactggtgacaaaaaggctgttaggaaaaaaattattggaactatatccagaaaacaggacaaggtattttggtgcagggtagacagaagagaggagatcaaggtgagcccccaatgatctactagagaaagactattggaaatcctataggaggtgctgccaccaatgtacaattttcgttaattacctcaattgtggctgttatccccttaatgagaaacataactttacttctaagcaggcagtgacgctggcagaaagttgaaacctgaaaatcagcagatacagggttgcatataaccctttctattgaaattaagccacatagaaaacacagggagaggactccaaatagcttcagacagcagccagccatgcagggccctcaccaggcaccggatggacgctctctggactcctcaaaagaggcccaaatcacaagtgctcatttcaataacataagaaaataaacatggggcttatttatagcacaggaaagggactggggcaagagaactgctcatttggtaatccaccctgacggggccagataggatccagacccccaggctctctggtaacacggtaagcagaaataggggccggaagagggctggctgccagcatcaccaggtacaatctggtaaacgatctggttaataaaaggggaagagatatgatacatcattccatctcaccaactcaggcataagtgctcttgctgtctccaatttctggctgaggaaactaaggcatggtcaagggaagtcactgtgagaaaaggacattttaaagcttcttgcatcctccatacattggagaagatggggttaatggaatcctcatttacagctgggactaaaacatacatgcttagagtcctgggccactgatggactcacatcatcttaccaagctcaagaactcccactagaactggagctcaagaacaggatagggacactgtcttagtcaactctaattgctatatctcttgggcctaccacactgcctggcaaagacaacattttctcttttgagacggagtcttgctctgtcgcccaggctggagtgtagtggcacaatctcagctcactgcaagctccacctctcaggttcacgccattctcctgcctcagcctcccgagtagctggggctacaggtgcctgccactatgcccggctaattctttgtatttttagtagagatggggtttcaccgtgttagccaggagggtctcgatctcgtgacctcatgatctgcccgctttggcctcccaaaatgctgggattacaggcatgagccaccatgcccagccaaagactacattttcatgagaaaatgaatagttagcataacagaatgactgaataaatgttctcttccctcatctggatcagtaactagttggttggtcttcagctgtgctcaccagaaaaccaaatgttccttgagttgatgcttgggtatagtagccaatgatatatttgcagctataagtaaaattccaaataaatatattctaaagggaaggttctatatggtggcaaggcctgactggtggctttggtctaagacatatggatccctcctctgtcagccactcccacaccacctgcaattcctgagaggttgtccacaagatggggctttgctgaggaagcctctagcagacacagctgcctggtacttcttgagaactaccttgtcttctgtctgatagttctgtgcctttcagggagagtgggaagagatgcaaccagtggtccaaccaactgagagcagaagaaaggaaaaagtgctatcctgggccaggcatggtggttcacacctgtaatcccaacactttgggacgctgaggcaggaggatcacttgatcccaggagttagagaccagcctaggcaacatagtgaggccctgtctctccaaaaaaattaaaagatcagccaggtgtggtggtgcacgcttttagtctcagctacttggaaggctgagatgggaagactgcttgagtccaggagtttgaggctgcagcgagccatgatcacagcactacactccagcctatgggacagagtgagactctgtttccaaagaaaaaacaaaaaaaacaaaaacaaacaaacaaacaaacaaaaaaactctaccctgaaatggttgcaaatgtgaagaaacaaaatgccagatacagatgctggtgactcaactatttcttgaaaaggaaagaggcctggaagcttgggagagggggccaaactttctctggtcatcttcccactgttgccagcaatggtgagccggaaattgaaagaatgacacaaggttgcctgtacagacccacacaccctcccaggaaattggggaagctgggcatccctaacagtccatttaatggaggtggaaaagaggctgtggcttgagcttacaatgccctcacccagtcttcagatgaactcacagctcccaccctaaaatgagggggaaacattaaaatttagagtgggtcttgcctgcctgactttcctctgccaagataagctcaataaggcctgttcacagatgatgcatggctggtataatgggaccaaatgctgcccttgattctactcagaagtagaaagtgggtgagtaccaaacacaggccgaggacaggaggtccagggcttggacagagctcaggggtgaggtgagtaggggcaggccccacaggtttcatatgcctccaggccctgcagtggaaagctcaagttgctttcaaagtctctctggatggaagctgctgccaatatggttaacactcctgccagaactgctcctcaggaagtggctggaggagacatggggccagtttagcattctctactctgcctctctgtgccagggctgcttggggaacagcccactgtggcttctcttgctgcaatggaagagtacccgagccaagagaaatggaaaaagcagcatacccccaaaggagctacaaagcaaaggaaacacaccaggctcatgatgggtggctgatgggaagtctccaacacccaaagcctttactctatcagctgggtcctcacaggatctaactgcagagctaggaagagccttcccagaacccaaccacttcccaaacccagtctctgcttcatctactttctgattactatcttggctgaaaactatcaaaggttcttggattttaacctcaaatcaacttcagaacctgtggctagaaacgtgctatctttcagtgataaagacgctctagtttcctcctggcatggtgcctgtcagaggctatcatcctagaaggaagctaggatcacagggttattagcaacatctttggccaatgagagcaaagagggagcttgtctcttccagctcccagtctgcgtcagcacagaccagcatgatggtcactattttccaaaggcagcagagaaaccagcacttaaaaaccacaagttcaaagcccagctggaagtagatgaggctttggcagagaaaccagggtggtcagagctttgaacttgatgacactgagtaaaggatacagtggctgagcgtggggactcacgcccgtaatcccagcactttgggaggtcaaggcgtgcagatcacctgaggtcaggagttcgagaccagcctggctaacgtggtgaaaccctgcctctactaaaattacaaacaaattagccaggcgtggtggcaagcgcctgtaatcccagctactcaggaggctgaggcaggagaatcacttgaacctgggaggcggaggatgtagtgagccgagaccatgctattgttgcactccagcctgggtgacaagagcaagactctgtctcaaaaaaaaaaaaaaaaaaaaggatacagcagagcatcactggcaggaaagaacacaagattctgacaactaaagttgctgtttttctctttaattctcccagaaaaggaggtttatacctaaatgtgtgagggttggtaaaatacatgagataaacattttaacaactatgtaatgttaatcagcaaaataaaaaagtatttccagccctggcattccaagcaggcccatcccagttaggcccctgggggcaaagccagtggctcagtgtgcacttgggccagggccagttcaagttcgtcttctctataggccagtaagatgtgtttctttaaaaagatttcttaatctaaaaccagctgttgtctgctgtaggccagaacacgacattttaattagcatgattgttctgcttctgaaaccaggctctatggcatcccgaggacagatgatcctgacctaagcttatgggtgaggtttgctggttagcagctcagaaatacacgaacaataaagtggagtccctagcccactctgaatccatgaatcgccatcacctgctatatccctgtcttgaatttctacggtgactgtaccacctatctgttcatagggtaacatcacctttgaggttgtttcaagtgcctaggatataatgctccttctttaacataaattgttttatgctgtgttgcaagatctaacacccaatattcctgggagtaatgaggtactttaaatggagttgtaatgcctttaaagtccaatgactcctatgacgatgataaagtcacacagctctctagggctcacaatgaactcagatgaaagagttcctcttcccaaatcaaaggactctcaagattttaaaaaataaaaatttaaaaatgtaccctttgggagagaagctgcattagaaaccagccactaaggtagtgcattcgatgatgagcaaaagggcagaaatttgaagaaaccagggcaatatgacacatacacaatgccagcacagtccatagctttcagcagagatttcaatgtaagaccctcccctatacctgccccacatcttggaaaacaaactagaaaacccctagaaagattagaggtcctcactgtgcttgtcagcctctggtacctgggtgacaacagaaatatttttcctggctttctaccatatcgtccccaatattatgaatacatgagaccaaaatgctttcccatgtctcctactgaccagtacacattacccaaatcaaaagtatttggtaagcacctgtgtttgctgctgtcagaaactgaaaaaaatcacttcagtttctgcatttgcaaaatgaacatctgcagcttcagtttctgcatttgcaaaatgaacaaactggatgagatgatcgcttgccccctttggcaataatagtccatgattcgatcacttattcaaatgaaagaagacaaaactcttatgatttccacttccaactttgctacttctgaaactttctttgacctctcaaagtctggggaacacatctgaagtgactcttgatgaaactacagcataataactgcccaccttcatgtcactcaacagaacaatggatggtgtatgactgacgctgactggcaaaacaactaggtttctgtaattatatccatattctaagcaaattgttatgtattttgtgttttggggacatatgttgtggctaaagcccaaactgtggctaatcttaatatcagagccagataaatctgtttcgaatccataacatttaacattcgccagggtagatttgttcatcaactgggcttaaagaggtataattcacacatgtgcagtattagtaaatgctgaaatttaatgatttaaatataccagcaactgttgcaaagcagttgtatagcagcatttaacgttagccagaacctccctggctaatgttaagtttataccaaaagaatgagagaaattttggcatccccttgggatgggggtcacaattcccacaacttttacgggtaccagctagagcgactccttgcatggctagtacagaccctctgtttttctctgacaatacctttaaaacattgactggatctaatcaggaagcaaacagattcctctggaggtttctgagtcatctgttcttaaaatggttatgatttgggaccttcttacgcttgatgcagagggtatcagacattcctcctggcgtgtgttcccagacatgggcagaagactgttgtcaggccaaagacggagttaaatatatcaagggagaaaggtggttccttggactatcaggaattggtgtttaagacacagtagaaaaaggaataaaaaataattttaatcatatcaaaaagccaaaccaaagaggaatagctcatggaactgacaggatcctgactcagcggctggtgctcttcctgtgcacaagcccagcactccaggtcccaaggcatttatcaaatcccaccaagatgtttggcttttgcaccgaattctgggtttggttccctgaaagaactcattgatgtaaataactaaaagtgaggtctgggtaccctttacatgattccccagacctcaaatgggctaacacgcttctcttctccagcagtcttcctgtccgtgaagtttccttccagattgttacatggaactgaaaacaaagggagcctcagctggatttaaatctggagcatgccacaaagtcttccacttggcattttcgagaagaacccatcagagatcataagaaatacaagaacagaggttgcatagctcgaggtgcttggatattcattctaggttcttgttcttgagaaagtgggttaggtgggtgcatgccaagatccaagtaggtcaaccttccacccttaacctactactctgacatcagagtgctgggaggccttgttctctccctctgtcccagcctcacattcagacctccaccaatgacacgtttcataagctgccaatgttggggaagctcttcagcttctcaggaaagtcatctttgtacaggacagggtcagctcggtgttccaccaccttgagaggcatggtcccgaagactgaagcaaacttgttgatgcactctgacctctccaccatgtgtgtttggtctagtgaaagcccatctatggctgtgcactcaggacacttgaatttctttcgtggggttaccttgataactgcttttcccgtgacgttggccaccaggaagttcatggcaatatcttcacagttcatatgagcatctacccagttcttgatatccccaggcattttgtaggtatacaggtaattaaaatacttgtgataaaaagctgccccagtgagcaccatggacacttcattcgtccactcagactcatacttccacttattcatctcatggtcccagagatgcagacgacccgggtaacccaccaaccggtcaggaaattcccgccagacctcataaccaaattgcagctcgtcagaggtcagcataatgatatcatcatcaatggccagaacagcttctgtctcgatttcatcataagggaagaaacggttacttaacttgttttcagcagtcctcacaacttttaatggaacccggattttgggccagagagaatcttctggagggtttttattctgattattccagacgacaagtagtttggatagactgggcaccttggacacttcagtgatgacccggaagaggctctctactcggtcgtaggtgaggactatggcggtgaacccttgagactgtggtgggatcagcgggaggaagagtggattgctcacgctgccccacttcacagcaggagggtcattccattcttcataggagatggcagcatatggatagatccggtcattgataatctgcagggtggccagggcaatggctttaattgactggaagtacgcttcccagaaccaccgggcctgtctctgcatttcttcaatctgtctttgggggatgctctgcaaaatactgtacacatctgacatcttttcttctggtacaaccacagatgctctcttccagtcaagaacttcagagaaaggcaaaatataggagtctgcaatgacaaccgggacacagccagcttgtaacacatcgctcaatactgcctggcccagccgagctccacgaagaaccacacagaaagtagcctcctgtagcacctgtgggtaatcgaagacctggtgcttgtggcagcgcttacggacagaaaggacaccctctgagaggttggtgcatttatcgagtactaacactgactctccatgtttgacctggagggcttctaggtcctctctgtactcaggatggagacccacctgagatgacaggaggaagtattgccgtggacctggtcctttctctggaagatccacctcagctgacagtggactatagacaggaatgctgacatcgtagccttgccggtaagtccacgtagaaaagccgccaccagccaacagggccctgtctctggggacatccagggctgtgttataatctgggggacctccaggcaacatgttgaacaacaggtgattcgtacctcgatcccacctagagagctgggccatcgcttgtgctgtctccttgatgcgcagtgtgttctggttaagcacatcgatggagggaacaaacagacaggcccggttgatgtcatcagtgtagtagtcactgtctgagatggccatgagcagttcattatactcccgggagatggtgttgctgacagagacgccaaagtcatccacgtactttttcagagcatagatatacaccttgattttgttctttgggttgaagccacagcgatagacatcaaaacacgtgtgcattctgcaactgagatccccccgctctgggatgggactgtcggctggcagcctaacaaccggcacatcacggatgctgcgcttctctacattccagtcatttgaggactcgatagaatggggccaaaactgaaacatgccagtggcaatgaggcccaggaggacaatggagaagagggtgatatagtagattcggtgcttggtcttcattcttgggatgagggcaggaccccggatattatacttgaccgacgcacacataatgacacagacagcctcttcctcacactccaaaagcatctcaaggagaaacagcaactctgagtagctctcggccacggctgcctcccgctcggccccgagcttggtcaccggctcatgccgcggggcgcgggccacctccgcccaggtcggatcggtccgaatcgccagccgccactgccagggccgagtctgggctggcgagcagcgagcgaggggccggtaaccgggatccgggccgtct

SEQ ID NO: 21 - DNA, 2957 bp, Mus musculus
  misc_feature 1..2957: note = >XM_006498732.3 PREDICTED: Mus musculus exostoses (multiple) 2 (Ext2), transcript variant X3, mRNA
  source 1..2957: mol_type = genomic DNA
ccgcttcgcatgcgcagtgcgcgccgtgtcagccgtggggaactggaggccggcgcaggcttccccgctggctccagggtacctggtgctggcggcgggctcccgtcaccgcgcgatccgacacagccgtggctcgcggcccgcggcaagagccggtgacggagcgcggggccgagcgggaagcggccggttccgagggaggttcagaagtttgtcacacagtgctgtcaggaggatgaagtagcacatactaaatgcacatgtgtagggtgtgtgaggacgaggacacctgtttcattatgtgtgcgtcagtcaagtccaacatccggggtcccgccctcatcccaaggatgaagaccaagcaccgaatctactacgtcaccctgttctccatcgtcctcctgggcctcatagccacgggcatgtttcagttctggcctcactccattgagtcctccagtgatgggggtgtggagaaacgcagcatcagggaggtgcccgtggtcaggctgcccactgacagccccatcccagagcggggggatctcagctgtagaatgcatacgtgtttcgatgtctaccgctgcggcttcaacccaaagaacaaaatcaaggtgtacatctaccccctaaaaaagtatgtggatgatgccggtgttccggtgagcagcgccatctcccgggagtacaatgaactgctgacggccatctcagacagcgactactacacagacgacatcaaccgggcctgtctgttcgtcccctccattgacgtactaaaccagaacccccttcgaataaaggagacggcgcaggccctggcccagctttccaggtgggatcgaggaacaaatcacctgctgttcaatatgttgcctggagctcccccagattacaacactgccctggatgtccccagagacagggcactgctggctggtggcggcttttctacctggacttaccggcagggctacgatgtcagcattcctgttttcagcccactgtcagctgagatggctctcccagagaaagcaccaggtccccggcgctacttcctactgtcctctcagatggccatccaccctgagtacagagaggaactagaagccctccaggccaaacaccaagagtcagtgttagtcttggacaaatgcaccaatctctcggagggcgtcctgtccgtgcgaaagcgctgccaccagcaccaggtcttcgattacccccaagtgctgcaggaggctactttttgtacggtccttcgaggagctcggctgggccaggcggtgctgagcgatgtcctacaggctggctgtgtcccagttgtcattgcagactcttatattctgcctttctctgaagttctggactggaagagggcatctgtggtcgttccagaggaaaagatgtcagatgtgtacagcatcctgcagaacatcccacagaggcagattgaagagatgcagagacaggcacggtggttctgggaggcatacttccagtccattaaagccattgccctggccaccctacagatcatcaatgacaggatctatccatatgcagccatctcctatgaagagtggaatgaccctcctgctgtgaagtgggctagtgtgagcaacccgctcttcctgccgctgatcccacctcagtcccaaggcttcactgccatcgtcctcacctacgaccgcgtggagagcctcttccgggtcatcaccgaggtgtccaaggtgcccagtctgtccaagctgctggtggtctggaataatcagaataaaaaccctccggaagaatctctgtggcccaaaatccgagttcccctgaaggttgtgaggactgcagaaaacaagctaagtaatcgtttcttcccttacgacgaaatcgagacagaggccgtgctggccatcgatgacgacatcatcatgctgacctctgacgagctgcagtttggttatgaggtctggcgggaatttcccgaccgcctggtgggctacccaggccgcctgcatctctgggaccacgagatgaacaagtggaagtatgagtctgaatggaccaatgaggtgtccatggtgctcacgggcgcagccttctatcacaagtattttaattacctgtacacctacaaaatgcctggagacatcaagaactgggtggatactcacatgaactgtgaagatattgccatgaattttctggtggccaatgtcacagggaaagctgtcatcaaggtaaccccaaggaagaagttcaagtgtcctgagtgcacggccatcgacgggctctccctagaccagactcacatggtagagagatctgagtgcatcaacaagtttgcttccgtcttcggaacgatgcccctcaaggtggtggagcaccgagcggaccctgtcctctacaaagatgacttccccgagaaactgaagagcttccccaacattggcagcttatgaagcttgctgcacctcccggggctccggggtggggccagggaggccagcctgggtccgacttcccaaacacactggagctcgttgagctggctgcgcagcctgctttgtcctcccatctccgtggactctgtgaaaatgccaaaggaaggaagcctcagggacaggctgcaacttggagcccagcgcatcactctcggcttgctggtgcagttcaccatctcactggccctacaactgccttagaggagtcagctgtccagttttagatcccaggagtcacagcagagccttgcagtcatttcacatgcgcagactctggagagagcaaacctgccatgggctacagatcccaatacctctgagggtcagaactgtgcttgggacctgagtcatgagcccagatccacagcagagcacaggctgccaagatgtctactgaaagtccctgatcaactctttgttttggctttttgatatgattaaaattattttttactgttt

SEQ ID NO: 22 - DNA, 2957 bp, Mus musculus
  misc_feature 1..2957: note = Reverse Complement of SEQ ID NO:21
  source 1..2957: mol_type = genomic DNA
aaacagtaaaaaataattttaatcatatcaaaaagccaaaacaaagagttgatcagggactttcagtagacatcttggcagcctgtgctctgctgtggatctgggctcatgactcaggtcccaagcacagttctgaccctcagaggtattgggatctgtagcccatggcaggtttgctctctccagagtctgcgcatgtgaaatgactgcaaggctctgctgtgactcctgggatctaaaactggacagctgactcctctaaggcagttgtagggccagtgagatggtgaactgcaccagcaagccgagagtgatgcgctgggctccaagttgcagcctgtccctgaggcttccttcctttggcattttcacagagtccacggagatgggaggacaaagcaggctgcgcagccagctcaacgagctccagtgtgtttgggaagtcggacccaggctggcctccctggccccaccccggagccccgggaggtgcagcaagcttcataagctgccaatgttggggaagctcttcagtttctcggggaagtcatctttgtagaggacagggtccgctcggtgctccaccaccttgaggggcatcgttccgaagacggaagcaaacttgttgatgcactcagatctctctaccatgtgagtctggtctagggagagcccgtcgatggccgtgcactcaggacacttgaacttcttccttggggttaccttgatgacagctttccctgtgacattggccaccagaaaattcatggcaatatcttcacagttcatgtgagtatccacccagttcttgatgtctccaggcattttgtaggtgtacaggtaattaaaatacttgtgatagaaggctgcgcccgtgagcaccatggacacctcattggtccattcagactcatacttccacttgttcatctcgtggtcccagagatgcaggcggcctgggtagcccaccaggcggtcgggaaattcccgccagacctcataaccaaactgcagctcgtcagaggtcagcatgatgatgtcgtcatcgatggccagcacggcctctgtctcgatttcgtcgtaagggaagaaacgattacttagcttgttttctgcagtcctcacaaccttcaggggaactcggattttgggccacagagattcttccggagggtttttattctgattattccagaccaccagcagcttggacagactgggcaccttggacacctcggtgatgacccggaagaggctctccacgcggtcgtaggtgaggacgatggcagtgaagccttgggactgaggtgggatcagcggcaggaagagcgggttgctcacactagcccacttcacagcaggagggtcattccactcttcataggagatggctgcatatggatagatcctgtcattgatgatctgtagggtggccagggcaatggctttaatggactggaagtatgcctcccagaaccaccgtgcctgtctctgcatctcttcaatctgcctctgtgggatgttctgcaggatgctgtacacatctgacatcttttcctctggaacgaccacagatgccctcttccagtccagaacttcagagaaaggcagaatataagagtctgcaatgacaactgggacacagccagcctgtaggacatcgctcagcaccgcctggcccagccgagctcctcgaaggaccgtacaaaaagtagcctcctgcagcacttgggggtaatcgaagacctggtgctggtggcagcgctttcgcacggacaggacgccctccgagagattggtgcatttgtccaagactaacactgactcttggtgtttggcctggagggcttctagttcctctctgtactcagggtggatggccatctgagaggacagtaggaagtagcgccggggacctggtgctttctctgggagagccatctcagctgacagtgggctgaaaacaggaatgctgacatcgtagccctgccggtaagtccaggtagaaaagccgccaccagccagcagtgccctgtctctggggacatccagggcagtgttgtaatctgggggagctccaggcaacatattgaacagcaggtgatttgttcctcgatcccacctggaaagctgggccagggcctgcgccgtctcctttattcgaagggggttctggtttagtacgtcaatggaggggacgaacagacaggcccggttgatgtcgtctgtgtagtagtcgctgtctgagatggccgtcagcagttcattgtactcccgggagatggcgctgctcaccggaacaccggcatcatccacatacttttttagggggtagatgtacaccttgattttgttctttgggttgaagccgcagcggtagacatcgaaacacgtatgcattctacagctgagatccccccgctctgggatggggctgtcagtgggcagcctgaccacgggcacctccctgatgctgcgtttctccacacccccatcactggaggactcaatggagtgaggccagaactgaaacatgcccgtggctatgaggcccaggaggacgatggagaacagggtgacgtagtagattcggtgcttggtcttcatccttgggatgagggcgggaccccggatgttggacttgactgacgcacacataatgaaacaggtgtcctcgtcctcacacaccctacacatgtgcatttagtatgtgctacttcatcctcctgacagcactgtgtgacaaacttctgaacctccctcggaaccggccgcttcccgctcggccccgcgctccgtcaccggctcttgccgcgggccgcgagccacggctgtgtcggatcgcgcggtgacgggagcccgccgccagcaccaggtaccctggagccagcggggaagcctgcgccggcctccagttccccacggctgacacggcgcgcactgcgcatgcgaagcgg

SEQ ID NO: 23 - DNA, 2943 bp, Mus musculus
  misc_feature 1..2943: note = >NM_001355075.1 Mus musculus exostosin glycosyltransferase 2 (Ext2), transcript variant 1, mRNA
  source 1..2943: mol_type = genomic DNA
agtgcgcgccgtgtcagccgtggggaactggaggccggcgcaggcttccccgctggctccagggtacctggtgctggcggcgggctcccgtcaccgcgcgatccgacacagccgtggctcgcggcccgcggcaagagccggtgacggagcgcggggccgagcgggaagcggccggttccgagggaggttcagaagtttgtcacacagtgctgtcaggaggatgaagtagcacatactaaatgcacatgtgtagggtgtgtgaggacgaggacacctgtttcattatgtgtgcgtcagtcaagtccaacatccggggtcccgccctcatcccaaggatgaagaccaagcaccgaatctactacgtcaccctgttctccatcgtcctcctgggcctcatagccacgggcatgtttcagttctggcctcactccattgagtcctccagtgatgggggtgtggagaaacgcagcatcagggaggtgcccgtggtcaggctgcccactgacagccccatcccagagcggggggatctcagctgtagaatgcatacgtgtttcgatgtctaccgctgcggcttcaacccaaagaacaaaatcaaggtgtacatctaccccctaaaaaagtatgtggatgatgccggtgttccggtgagcagcgccatctcccgggagtacaatgaactgctgacggccatctcagacagcgactactacacagacgacatcaaccgggcctgtctgttcgtcccctccattgacgtactaaaccagaacccccttcgaataaaggagacggcgcaggccctggcccagctttccaggtgggatcgaggaacaaatcacctgctgttcaatatgttgcctggagctcccccagattacaacactgccctggatgtccccagagacagggcactgctggctggtggcggcttttctacctggacttaccggcagggctacgatgtcagcattcctgttttcagcccactgtcagctgagatggctctcccagagaaagcaccaggtccccggcgctacttcctactgtcctctcagatggccatccaccctgagtacagagaggaactagaagccctccaggccaaacaccaagagtcagtgttagtcttggacaaatgcaccaatctctcggagggcgtcctgtccgtgcgaaagcgctgccaccagcaccaggtcttcgattacccccaagtgctgcaggaggctactttttgtacggtccttcgaggagctcggctgggccaggcggtgctgagcgatgtcctacaggctggctgtgtcccagttgtcattgcagactcttatattctgcctttctctgaagttctggactggaagagggcatctgtggtcgttccagaggaaaagatgtcagatgtgtacagcatcctgcagaacatcccacagaggcagattgaagagatgcagagacaggcacggtggttctgggaggcatacttccagtccattaaagccattgccctggccaccctacagatcatcaatgacaggatctatccatatgcagccatctcctatgaagagtggaatgaccctcctgctgtgaagtgggctagtgtgagcaacccgctcttcctgccgctgatcccacctcagtcccaaggcttcactgccatcgtcctcacctacgaccgcgtggagagcctcttccgggtcatcaccgaggtgtccaaggtgcccagtctgtccaagctgctggtggtctggaataatcagaataaaaaccctccggaagaatctctgtggcccaaaatccgagttcccctgaaggttgtgaggactgcagaaaacaagctaagtaatcgtttcttcccttacgacgaaatcgagacagaggccgtgctggccatcgatgacgacatcatcatgctgacctctgacgagctgcagtttggttatgaggtctggcgggaatttcccgaccgcctggtgggctacccaggccgcctgcatctctgggaccacgagatgaacaagtggaagtatgagtctgaatggaccaatgaggtgtccatggtgctcacgggcgcagccttctatcacaagtattttaattacctgtacacctacaaaatgcctggagacatcaagaactgggtggatactcacatgaactgtgaagatattgccatgaattttctggtggccaatgtcacagggaaagctgtcatcaaggtaaccccaaggaagaagttcaagtgtcctgagtgcacggccatcgacgggctctccctagaccagactcacatggtagagagatctgagtgcatcaacaagtttgcttccgtcttcggaacgatgcccctcaaggtggtggagcaccgagcggaccctgtcctctacaaagatgacttccccgagaaactgaagagcttccccaacattggcagcttatgaagcttgctgcacctcccggggctccggggtggggccagggaggccagcctgggtccgacttcccaaacacactggagctcgttgagctggctgcgcagcctgctttgtcctcccatctccgtggactctgtgaaaatgccaaaggaaggaagcctcagggacaggctgcaacttggagcccagcgcatcactctcggcttgctggtgcagttcaccatctcactggccctacaactgccttagaggagtcagctgtccagttttagatcccaggagtcacagcagagccttgcagtcatttcacatgcgcagactctggagagagcaaacctgccatgggctacagatcccaatacctctgagggtcagaactgtgcttgggacctgagtcatgagcccagatccacagcagagcacaggctgccaagatgtctactgaaagtccctgatcaactctttgttttggctttttgatatgattaaaattattttttactgtttt

SEQ ID NO: 24 - DNA, 2943 bp, Mus musculus
  misc_feature 1..2943: note = Reverse Complement of SEQ ID NO:23
  source 1..2943: mol_type = genomic DNA
aaaacagtaaaaaataattttaatcatatcaaaaagccaaaacaaagagttgatcagggactttcagtagacatcttggcagcctgtgctctgctgtggatctgggctcatgactcaggtcccaagcacagttctgaccctcagaggtattgggatctgtagcccatggcaggtttgctctctccagagtctgcgcatgtgaaatgactgcaaggctctgctgtgactcctgggatctaaaactggacagctgactcctctaaggcagttgtagggccagtgagatggtgaactgcaccagcaagccgagagtgatgcgctgggctccaagttgcagcctgtccctgaggcttccttcctttggcattttcacagagtccacggagatgggaggacaaagcaggctgcgcagccagctcaacgagctccagtgtgtttgggaagtcggacccaggctggcctccctggccccaccccggagccccgggaggtgcagcaagcttcataagctgccaatgttggggaagctcttcagtttctcggggaagtcatctttgtagaggacagggtccgctcggtgctccaccaccttgaggggcatcgttccgaagacggaagcaaacttgttgatgcactcagatctctctaccatgtgagtctggtctagggagagcccgtcgatggccgtgcactcaggacacttgaacttcttccttggggttaccttgatgacagctttccctgtgacattggccaccagaaaattcatggcaatatcttcacagttcatgtgagtatccacccagttcttgatgtctccaggcattttgtaggtgtacaggtaattaaaatacttgtgatagaaggctgcgcccgtgagcaccatggacacctcattggtccattcagactcatacttccacttgttcatctcgtggtcccagagatgcaggcggcctgggtagcccaccaggcggtcgggaaattcccgccagacctcataaccaaactgcagctcgtcagaggtcagcatgatgatgtcgtcatcgatggccagcacggcctctgtctcgatttcgtcgtaagggaagaaacgattacttagcttgttttctgcagtcctcacaaccttcaggggaactcggattttgggccacagagattcttccggagggtttttattctgattattccagaccaccagcagcttggacagactgggcaccttggacacctcggtgatgacccggaagaggctctccacgcggtcgtaggtgaggacgatggcagtgaagccttgggactgaggtgggatcagcggcaggaagagcgggttgctcacactagcccacttcacagcaggagggtcattccactcttcataggagatggctgcatatggatagatcctgtcattgatgatctgtagggtggccagggcaatggctttaatggactggaagtatgcctcccagaaccaccgtgcctgtctctgcatctcttcaatctgcctctgtgggatgttctgcaggatgctgtacacatctgacatcttttcctctggaacgaccacagatgccctcttccagtccagaacttcagagaaaggcagaatataagagtctgcaatgacaactgggacacagccagcctgtaggacatcgctcagcaccgcctggcccagccgagctcctcgaaggaccgtacaaaaagtagcctcctgcagcacttgggggtaatcgaagacctggtgctggtggcagcgctttcgcacggacaggacgccctccgagagattggtgcatttgtccaagactaacactgactcttggtgtttggcctggagggcttctagttcctctctgtactcagggtggatggccatctgagaggacagtaggaagtagcgccggggacctggtgctttctctgggagagccatctcagctgacagtgggctgaaaacaggaatgctgacatcgtagccctgccggtaagtccaggtagaaaagccgccaccagccagcagtgccctgtctctggggacatccagggcagtgttgtaatctgggggagctccaggcaacatattgaacagcaggtgatttgttcctcgatcccacctggaaagctgggccagggcctgcgccgtctcctttattcgaagggggttctggtttagtacgtcaatggaggggacgaacagacaggcccggttgatgtcgtctgtgtagtagtcgctgtctgagatggccgtcagcagttcattgtactcccgggagatggcgctgctcaccggaacaccggcatcatccacatacttttttagggggtagatgtacaccttgattttgttctttgggttgaagccgcagcggtagacatcgaaacacgtatgcattctacagctgagatccccccgctctgggatggggctgtcagtgggcagcctgaccacgggcacctccctgatgctgcgtttctccacacccccatcactggaggactcaatggagtgaggccagaactgaaacatgcccgtggctatgaggcccaggaggacgatggagaacagggtgacgtagtagattcggtgcttggtcttcatccttgggatgagggcgggaccccggatgttggacttgactgacgcacacataatgaaacaggtgtcctcgtcctcacacaccctacacatgtgcatttagtatgtgctacttcatcctcctgacagcactgtgtgacaaacttctgaacctccctcggaaccggccgcttcccgctcggccccgcgctccgtcaccggctcttgccgcgggccgcgagccacggctgtgtcggatcgcgcggtgacgggagcccgccgccagcaccaggtaccctggagccagcggggaagcctgcgccggcctccagttccccacggctgacacggcgcgcact

SEQ ID NO: 25 - DNA, 2732 bp, Rattus norvegicus
  misc_feature 1..2732: note = >NM_001107751.1 Rattus norvegicus exostosin glycosyltransferase 2 (Ext2), mRNA
  source 1..2732: mol_type = genomic DNA
gtgtcagacgtggggaactggaggccggcgcagcgttccccggctggctctggcttacctggtgctggcggcggcctcccgtcaccgcgcgatccgacacggccgtggctcgcgccccgcgcccaaagccggtggcggagcgcggggccgagcgggaggcggccggttccgaggtgtgtgaggacgaggacatctgtgtcattatgtgtgcgtccgtcaagtccaacatccggggtcctgccctcatcccaaggatgaagaccaagcaccggatctactacgtcaccctgttctccatcgtcctcctgggcctcatcgccactggcatgtttcagttctggcctcactccatcgagtcctccagcgatgggggtgtggagaaacgcagcatccgggaagtgccagtggtcaggctgacagctgacagccctatcccagagcggggggatctcagctgtagaatgcacacgtgtttcgatgtctaccgctgcggcttcaacccaaagaacaaaatcaaggtgtacatctaccccctaaagaagtacgtggatgacgccggtgttccggtgagcagcgccatctcccgggagtacaatgaactgctcacagccatctcagacagtgactactacacagatgacatcagccgagcctgtctgttcgtcccctccattgatgtgctgaaccagaacccccttcgaatcaaggagacagcgcaagccctggcccagcttcccaggtgggatcgagggacaaatcacctgctgttcaacatgttgcctggaggtcctccagattacaacactgccctggatgtccccagagacagggcactgctggctggtggcggcttttctacctggacttaccggcagggctacgatgtcagcattcctgttttcagcccactgtcagccgaagtggctctcccagagaaagcaccaggttcccggcgatacttcctgctgtcctctcagatggccatccaccctgagtacagagaggaactagaagccctccaggccaaacacagagagtccgtgttagtcctagacaaatgcaccaatctctcagagggcgtcctttccatccgaaagcgctgccaccagcaccaggtctttgattacccccaagtactgcaggaggctactttttgtacggttcttcgaggagctcggctgggccaggcagtgctgagcgatgtcttacaggctggctgtgtcccagttgtcattgcagactcttacattctgcctttctctgaagttctggactggaagagggcatctgtggtcattccagaggagaagatgtcagatgtgtacagcatcctgcagaacatcccacagaggcagattgaagagatgcagagacaggcacgatggttctgggaggcatactttcggtccattaaagccatcgccctggccaccctacagatcatcaatgacaggatctatccatatgcagccatttcctatgaagagtggaatgaccctcctgctgtgaagtgggctagtgtgagcaacccgctcttcctcccactgatcccaccacagtcgcaaggcttcactgccattgtcctcacctatgaccgtgtggagagcctcttccgggtcatcaccgaggtgtccaaggtgcccagtctgtccaagctgctggtggtctggaataatcagaataaaaaccctccagaagaatctctgtggcccaaaatccgtgttcccctgaaggttgtgaggactgcagaaaacaagctaagtaatcgtttcttcccttacgatgaaatcgagacagaggccgtgctggccatcgatgatgatatcatcatgctgacctctgatgagctgcagtttggttatgagtattttaattacctgtatacctacaaaatgcctggggacatcaagaactgggtagatgctcacatgaactgtgaagatattgccatgaatttcctagtggccaatgtcacagggaaagctgtcatcaaggtaaccccaagaaagaagttcaagtgtcctgagtgcacagccatcgacggactctcactagaccagactcacatggtagagaggtctgagtgcatcaataagtttgcttccgtcttcggaacgatgcccctcaaggtggtggagcaccgagcagaccctgtactctacaaagatgacttccctgagaaactgaagagtttccccaacatcggcagcttgtgagctcaccggttcccagggctgtggaggagccctacaacattcacggtgggggtgaggaggccagcctggctcagacttccccaaacacactggagcctcttgagctatgagccctgctttgtcctctcatctccgtggactctgaaaatgccaaaggaagggagcctcagggacaagctgcagcttggagcccagcctatcgctcttgggttgccaacccagctcaccatctcactgaccctgcagctgcctcagagggtcagctgtccagctccagatcccaggagtcacagcagaggcatgcgattgtttcacatctgcagactctggggaaatggcaaacctcaaacgtgctacagatcccagtacctctgagggttagaactgtgcttgggacccgagtcatgagcccaagtacacagcagagcacacgctgccaagatgtgtcctgacagtccctgaacaagtctttgttttggctttttgatatggttaaaattattttttactcctttt

SEQ ID NO: 26 - DNA, 2732 bp, Rattus norvegicus
  misc_feature 1..2732: note = Reverse Complement of SEQ ID NO:25
  source 1..2732: mol_type = genomic DNA
aaaaggagtaaaaaataattttaaccatatcaaaaagccaaaacaaagacttgttcagggactgtcaggacacatcttggcagcgtgtgctctgctgtgtacttgggctcatgactcgggtcccaagcacagttctaaccctcagaggtactgggatctgtagcacgtttgaggtttgccatttccccagagtctgcagatgtgaaacaatcgcatgcctctgctgtgactcctgggatctggagctggacagctgaccctctgaggcagctgcagggtcagtgagatggtgagctgggttggcaacccaagagcgataggctgggctccaagctgcagcttgtccctgaggctcccttcctttggcattttcagagtccacggagatgagaggacaaagcagggctcatagctcaagaggctccagtgtgtttggggaagtctgagccaggctggcctcctcacccccaccgtgaatgttgtagggctcctccacagccctgggaaccggtgagctcacaagctgccgatgttggggaaactcttcagtttctcagggaagtcatctttgtagagtacagggtctgctcggtgctccaccaccttgaggggcatcgttccgaagacggaagcaaacttattgatgcactcagacctctctaccatgtgagtctggtctagtgagagtccgtcgatggctgtgcactcaggacacttgaacttctttcttggggttaccttgatgacagctttccctgtgacattggccactaggaaattcatggcaatatcttcacagttcatgtgagcatctacccagttcttgatgtccccaggcattttgtaggtatacaggtaattaaaatactcataaccaaactgcagctcatcagaggtcagcatgatgatatcatcatcgatggccagcacggcctctgtctcgatttcatcgtaagggaagaaacgattacttagcttgttttctgcagtcctcacaaccttcaggggaacacggattttgggccacagagattcttctggagggtttttattctgattattccagaccaccagcagcttggacagactgggcaccttggacacctcggtgatgacccggaagaggctctccacacggtcataggtgaggacaatggcagtgaagccttgcgactgtggtgggatcagtgggaggaagagcgggttgctcacactagcccacttcacagcaggagggtcattccactcttcataggaaatggctgcatatggatagatcctgtcattgatgatctgtagggtggccagggcgatggctttaatggaccgaaagtatgcctcccagaaccatcgtgcctgtctctgcatctcttcaatctgcctctgtgggatgttctgcaggatgctgtacacatctgacatcttctcctctggaatgaccacagatgccctcttccagtccagaacttcagagaaaggcagaatgtaagagtctgcaatgacaactgggacacagccagcctgtaagacatcgctcagcactgcctggcccagccgagctcctcgaagaaccgtacaaaaagtagcctcctgcagtacttgggggtaatcaaagacctggtgctggtggcagcgctttcggatggaaaggacgccctctgagagattggtgcatttgtctaggactaacacggactctctgtgtttggcctggagggcttctagttcctctctgtactcagggtggatggccatctgagaggacagcaggaagtatcgccgggaacctggtgctttctctgggagagccacttcggctgacagtgggctgaaaacaggaatgctgacatcgtagccctgccggtaagtccaggtagaaaagccgccaccagccagcagtgccctgtctctggggacatccagggcagtgttgtaatctggaggacctccaggcaacatgttgaacagcaggtgatttgtccctcgatcccacctgggaagctgggccagggcttgcgctgtctccttgattcgaagggggttctggttcagcacatcaatggaggggacgaacagacaggctcggctgatgtcatctgtgtagtagtcactgtctgagatggctgtgagcagttcattgtactcccgggagatggcgctgctcaccggaacaccggcgtcatccacgtacttctttagggggtagatgtacaccttgattttgttctttgggttgaagccgcagcggtagacatcgaaacacgtgtgcattctacagctgagatccccccgctctgggatagggctgtcagctgtcagcctgaccactggcacttcccggatgctgcgtttctccacacccccatcgctggaggactcgatggagtgaggccagaactgaaacatgccagtggcgatgaggcccaggaggacgatggagaacagggtgacgtagtagatccggtgcttggtcttcatccttgggatgagggcaggaccccggatgttggacttgacggacgcacacataatgacacagatgtcctcgtcctcacacacctcggaaccggccgcctcccgctcggccccgcgctccgccaccggctttgggcgcggggcgcgagccacggccgtgtcggatcgcgcggtgacgggaggccgccgccagcaccaggtaagccagagccagccggggaacgctgcgccggcctccagttccccacgtctgacac

SEQ ID NO: 27 - DNA, 3911 bp, Macaca mulatta
  misc_feature 1..3911: note = >XM_028833498.1 PREDICTED: Macaca mulatta exostosin glycosyltransferase 2 (EXT2), transcript variant X2, mRNA
  source 1..3911: mol_type = genomic DNA
tcctgctgccaccttcccgccagccacagggatctgattactcccacggggatgtcctgcgcctcagggcccggcggtggcctgcggcatcccctgcggtgccgggagccgtgggacgaggagtgtgagaaagaggctgtctgtgtcattatgtgtgcgtcggtcaagtataatatccggggtcctgccctcatcccaagaatgaagaccaagcaccgaatctactatatcaccctcttctccattgtcctcctgggcctcattgccactggcatgtttcagttctggccccattctatcgagtcctcaaatgactggaatgtagagaagcgtagcgtccgtgatgtgccggtggtcaggctgccagccgacagtcccatcccagagcgcggggatctcagttgcagaatgcacacgtgttttgatgtctaccgctgtggcttcaacccaaagaacaaaatcaaggtgtatatctatgctctgaaaaagtacgtggatgactttggcgtccctgtcagcaacaccatctcccgggagtataatgaactgctcacagccatctcagacagtgactactacactgatgacatcaaccgggcctgcctgtttgttccctccatcgatgtgcttaaccagaacacactccgcatcaaggagacagcgcaagcgttggcccagctctctaggtgggatcgaggtacaaatcacctgttgttcaacatgttgcctggaggtcccccagattataacacggccctggatgtccccagagacagggccctgttagctggcggcggcttttctacgtggacttaccggcaaggctacgatgtcagcattcctgtctatagtccactgtcagctgaggtggatcttccagagaaaggaccaggtccgcggcgatacttcctcatatcgtctcaggtgggtctccatcccgagtacagagaagacctagaagccctccaggtcaaacacggagagtcagtgttagtgcttgataaatgcaccaacctctcagagggtggcctttctatccgtaagcgctgccacaagcaccaggtcttcgattacccacaggtgctacaggaggctactttctgtgtggtccttcgtggagctcggctgggccaggcaatattgagcgatgtgttacaagctggttgtgtcccagttgtcattgcagactcctatattttgcctttctctgaagttcttgactggaagagagcatctgtggttgtaccagaagaaaagatgtcagatgtgtacagtattttgcagagcatccctcaaagacagattgaagaaatgcagagacaggcccggtggttctgggaagcgtacttccagtcaattaaagccattgccctggccaccctgcagattatcaatgaccggatctatccatatgctgccatctcctatgaagaatggaatgaccctcctgctgtgaagtggggcagtgtgagcaatccactcttcctcccgctgatcccaccacagtctcaagggttcaccgccatagtcctcacttacgaccgagtagagagcctcttccgggtcatcactgaagtgtccaaggtgcccagtctatccaaactgcttgtcgtctggaataatcagaataaaaaccctccagaagattctctctggcccaaaatccgggttccattaaaagttgtgaggactgctgaaaacaagttaagtaaccgtttcttcccttatgatgaaatcgagacggaagctgttctggccattgatgatgacatcattatgctgacctctgatgagctgcaatttggttatgaggtctggcgagaatttcctgaccggttggtgggttacccgggtcgtctgcatctctgggaccatgagatgaataagtggaagtacgagtctgagtggacgaatgaagtgtccatggtgctcaccggggcagctttttatcacaagtattttaattacctgtatacctacaaaatgcctggggatatcaagaactgggtagatgctcatatgaactgtgaagatattgccatgaacttcctggtggccaacgtcacgggaaaagcagttatcaaggtaaccccacgaaagaaattcaagtgtcctgagtgcacagccatagatgggctttcgctagaccaaacacacatggtggagagttcaacaacattgcatgaattcctgccagggaggagtatgagaaaatagaggggcacagccccgcgggaagccaagactgaagaggagtccccggccctggctgcttacccagaaggctaagcgttcaggttccagggccctactcccagacggccaagatcaagactgcagttgcgcatgctggccaccaggaggcactgcagttccaataaagtcactggacggaaggtggtgatcctggggccccactgcctgatgaggtttctagaagtttgtttgaagacccaggtcctcgctgggaggatttgccactcaagcagtaattcagccctactatgcgtctgccaccgtcccagcactacaagggacaaagagatggatggggccagtcgctagccttccttgcagcagtcttccctccctagttctgggtgttttcacattcctgcccattccagtcccctccgaattcccacacggtggccctggcatcctcattggacagatgggcaaagtgaggcgccgagaggagggacccgtgagtgtcaccagcgactgagtaacagacaggctgagacctgggctcttttccattccctaagtggtccccctttggagacccatggggattccttggccctccagggaagattgagcccagtgggtgctcaggaaactgactaacttacaaaagcctttgccttgcaaaagctcccccaggacacccctgtagtttggcccagcggctctccatgtggctggcagatttgttaccagcttccctgtgggttcttcctgaggcaggcatctgccaaggcagggtctgcagccccctcctccatcgctccaccctcacacagaagctctctcagttcttccctcaatggcaggggttgtggttggggactgtctttctcttagtccagaaatggagtgggcttcccagagtccaggaaggaaaagggattaatgctgggctctctctctctctctctctctctctctctctcacacacacacacacacacacacacacacacacacacacacacaaaccaaaaaacaaaaccaggaactgggctttgtactttacaaagtactagggcatctattatgccaccagtagagttccagcctctttacaaccatcaggtttccattttgcagccccagaaactgaggccagaggggtaaatgccttgctgagaatcaataactgttaagaaggtccaggggtggtggatcatccctgtaatcccaaaatgttgggaggccaaggtgggagggtcacttgagcccagagttccatctagcctgggtgacagagggagacctgtctcaaaaaaaaaaaagaaagaaaagaaaagaaaaaaacccaaaaaactggtaagaggcagagctgaaacttggactccaggcctggggcatgcccgctgggccctcctgggatggatgctgtgggtgggactgggacaggcaaacaggagacagggtcgaggaggaaggcaggaagatggagaagtcacaggagaatggctgctctcagctgccttgagagattggccccctcgcaaccaccttcagggctgcccctgatcaaactgccctgctgaagatcaacttcattgaccatctggtacctcagatgtggaccagtgccttgtttcagggcctacacacactgatgtacttagaggcaaagaggcatatgtctgcaacttattcttttctttctttctttt

SEQ ID NO: 28 - DNA, 3911 bp, Macaca mulatta
  misc_feature 1..3911: note = Reverse Complement of SEQ ID NO:27
  source 1..3911: mol_type = genomic DNA
aaaagaaagaaagaaaagaataagttgcagacatatgcctctttgcctctaagtacatcagtgtgtgtaggccctgaaacaaggcactggtccacatctgaggtaccagatggtcaatgaagttgatcttcagcagggcagtttgatcaggggcagccctgaaggtggttgcgagggggccaatctctcaaggcagctgagagcagccattctcctgtgacttctccatcttcctgccttcctcctcgaccctgtctcctgtttgcctgtcccagtcccacccacagcatccatcccaggagggcccagcgggcatgccccaggcctggagtccaagtttcagctctgcctcttaccagttttttgggtttttttcttttcttttctttcttttttttttttgagacaggtctccctctgtcacccaggctagatggaactctgggctcaagtgaccctcccaccttggcctcccaacattttgggattacagggatgatccaccacccctggaccttcttaacagttattgattctcagcaaggcatttacccctctggcctcagtttctggggctgcaaaatggaaacctgatggttgtaaagaggctggaactctactggtggcataatagatgccctagtactttgtaaagtacaaagcccagttcctggttttgttttttggtttgtgtgtgtgtgtgtgtgtgtgtgtgtgtgtgtgtgtgtgtgtgagagagagagagagagagagagagagagagagcccagcattaatcccttttccttcctggactctgggaagcccactccatttctggactaagagaaagacagtccccaaccacaacccctgccattgagggaagaactgagagagcttctgtgtgagggtggagcgatggaggagggggctgcagaccctgccttggcagatgcctgcctcaggaagaacccacagggaagctggtaacaaatctgccagccacatggagagccgctgggccaaactacaggggtgtcctgggggagcttttgcaaggcaaaggcttttgtaagttagtcagtttcctgagcacccactgggctcaatcttccctggagggccaaggaatccccatgggtctccaaagggggaccacttagggaatggaaaagagcccaggtctcagcctgtctgttactcagtcgctggtgacactcacgggtccctcctctcggcgcctcactttgcccatctgtccaatgaggatgccagggccaccgtgtgggaattcggaggggactggaatgggcaggaatgtgaaaacacccagaactagggagggaagactgctgcaaggaaggctagcgactggccccatccatctctttgtcccttgtagtgctgggacggtggcagacgcatagtagggctgaattactgcttgagtggcaaatcctcccagcgaggacctgggtcttcaaacaaacttctagaaacctcatcaggcagtggggccccaggatcaccaccttccgtccagtgactttattggaactgcagtgcctcctggtggccagcatgcgcaactgcagtcttgatcttggccgtctgggagtagggccctggaacctgaacgcttagccttctgggtaagcagccagggccggggactcctcttcagtcttggcttcccgcggggctgtgcccctctattttctcatactcctccctggcaggaattcatgcaatgttgttgaactctccaccatgtgtgtttggtctagcgaaagcccatctatggctgtgcactcaggacacttgaatttctttcgtggggttaccttgataactgcttttcccgtgacgttggccaccaggaagttcatggcaatatcttcacagttcatatgagcatctacccagttcttgatatccccaggcattttgtaggtatacaggtaattaaaatacttgtgataaaaagctgccccggtgagcaccatggacacttcattcgtccactcagactcgtacttccacttattcatctcatggtcccagagatgcagacgacccgggtaacccaccaaccggtcaggaaattctcgccagacctcataaccaaattgcagctcatcagaggtcagcataatgatgtcatcatcaatggccagaacagcttccgtctcgatttcatcataagggaagaaacggttacttaacttgttttcagcagtcctcacaacttttaatggaacccggattttgggccagagagaatcttctggagggtttttattctgattattccagacgacaagcagtttggatagactgggcaccttggacacttcagtgatgacccggaagaggctctctactcggtcgtaagtgaggactatggcggtgaacccttgagactgtggtgggatcagcgggaggaagagtggattgctcacactgccccacttcacagcaggagggtcattccattcttcataggagatggcagcatatggatagatccggtcattgataatctgcagggtggccagggcaatggctttaattgactggaagtacgcttcccagaaccaccgggcctgtctctgcatttcttcaatctgtctttgagggatgctctgcaaaatactgtacacatctgacatcttttcttctggtacaaccacagatgctctcttccagtcaagaacttcagagaaaggcaaaatataggagtctgcaatgacaactgggacacaaccagcttgtaacacatcgctcaatattgcctggcccagccgagctccacgaaggaccacacagaaagtagcctcctgtagcacctgtgggtaatcgaagacctggtgcttgtggcagcgcttacggatagaaaggccaccctctgagaggttggtgcatttatcaagcactaacactgactctccgtgtttgacctggagggcttctaggtcttctctgtactcgggatggagacccacctgagacgatatgaggaagtatcgccgcggacctggtcctttctctggaagatccacctcagctgacagtggactatagacaggaatgctgacatcgtagccttgccggtaagtccacgtagaaaagccgccgccagctaacagggccctgtctctggggacatccagggccgtgttataatctgggggacctccaggcaacatgttgaacaacaggtgatttgtacctcgatcccacctagagagctgggccaacgcttgcgctgtctccttgatgcggagtgtgttctggttaagcacatcgatggagggaacaaacaggcaggcccggttgatgtcatcagtgtagtagtcactgtctgagatggctgtgagcagttcattatactcccgggagatggtgttgctgacagggacgccaaagtcatccacgtactttttcagagcatagatatacaccttgattttgttctttgggttgaagccacagcggtagacatcaaaacacgtgtgcattctgcaactgagatccccgcgctctgggatgggactgtcggctggcagcctgaccaccggcacatcacggacgctacgcttctctacattccagtcatttgaggactcgatagaatggggccagaactgaaacatgccagtggcaatgaggcccaggaggacaatggagaagagggtgatatagtagattcggtgcttggtcttcattcttgggatgagggcaggaccccggatattatacttgaccgacgcacacataatgacacagacagcctctttctcacactcctcgtcccacggctcccggcaccgcaggggatgccgcaggccaccgccgggccctgaggcgcaggacatccccgtgggagtaatcagatccctgtggctggcgggaaggtggcagcagga

SEQ ID NO: 29 - DNA, 3346 bp, Macaca fascicularis
  misc_feature 1..3346: note = >XM_015434880.1 PREDICTED: Macaca fascicularis exostosin glycosyltransferase 2 (EXT2), transcript variant X1, mRNA
  source 1..3346: mol_type = genomic DNA
catcaactcgtcctttacatcaggagtgtgagaaagaggctgtctgtgtcattatgtgtgcgtcggtcaagtataatatccggggtcctgccctcatcccaagaatgaagaccaagcaccgaatctactatatcaccctcttctccattgtcctcctgggcctcattgccactggcatgtttcagttctggccccattctatcgagtcctcaaatgactggaatgtagagaagcgtagcgtccgtgatgtgccggtggtcaggctgccagccgacagtcccatcccagagcgcggggatctcagttgcagaatgcacacatgttttgatgtctaccgctgtggcttcaacccaaagaacaaaatcaaggtgtatatctatgctctgaaaaagtacgtggatgactttggcgtccctgtcagcaacaccatctcccgggagtataatgaactgctcacagccatctcagacagtgactactacactgatgacatcaaccgggcctgcctgtttgttccctccatcgatgtgcttaaccagaacacactccgcatcaaggagacagcgcaagcgttggcccagctctctaggtgggatcgaggtacaaatcacctgttgttcaacatgttgcctggaggtcccccagattataacacggccctggatgtccccagagacagggccctgttagctggcggcggcttttctacgtggacttaccggcaaggctacgatgtcagcattcctgtctatagtccactgtcagctgaggtggatcttccagagaaaggaccaggtccgcggcgatacttcctcatatcgtctcaggtgggtctccatcccgagtacagagaagacctagaagccctccaggtcaaacacggagagtcagtgttagtgcttgataaatgcaccaacctctcagagggtggcctttctatccgtaagcgctgccacaagcaccaggtcttcgattacccacaggtgctacaggaggctactttctgtgtggtccttcgtggagctcggctgggccaggcaatgttgagcgatgtgttacaagctggttgtgtcccagttgtcattgcagactcctatattttgcctttctctgaagttcttgactggaagagagcatctgtggttgtaccagaagaaaagatgtcagatgtgtacagtattttgcagagcatccctcaaagacagattgaagaaatgcagagacaggcccggtggttctgggaagcgtacttccagtcaattaaagccattgccctggccaccctgcagattatcaatgaccggatctatccatatgctgccatctcctatgaagaatggaatgaccctcctgctgtgaagtggggcagtgtgagcaatccactcttcctcccgctgatcccaccacagtctcaagggttcaccgccatagtcctcacttacgaccgagtagagagcctcttccgggtcatcactgaagtgtccaaggtgcccagtctatccaaactgcttgtcgtctggaataatcagaataaaaaccctccagaagattctctctggcccaaaatccgggttccattaaaagttgtgaggactgctgaaaacaagttaagtaaccgtttcttcccttatgatgaaatcgagacggaagctgttctggccattgatgatgacatcattatgctgacctctgacgagctgcaatttggttatgaggtctggcgagaatttcctgaccggttggtgggttacccgggtcgtctgcatctctgggaccatgagatgaataagtggaagtacgagtctgagtggacgaatgaagtgtccatggtgctcaccggggcagctttttatcacaagtattttaattacctgtatacctacaaaatgcctggggatatcaagaactgggtagatgctcatatgaactgtgaagatattgccatgaacttcctggtggccaacgtcacgggaaaagcagttatcaaggtaaccccacgaaagaaattcaagtgtcctgagtgcacagccatagatgggctttcgctagaccaaacacacatggtggagaggtcagagtgcatcaacaagtttgcttcagtctttgggaccatgcctctcaaggtggtggaacaccgagctgaccctgtcctgtacaaagacgactttcctgagaaactgaagagcttccccaacattggcagcttatgaaacgtgccattggtggaggtctgaatgtgagactgggacagagcgagagaacaaggcctcccagcactccgatgtcagagaagtgggttaagggtggaaggttgacctacttggatcttggcatgtacccacctaacccactttctcaagaacaagaacctagaatgaatatccaagcacctcgagctatgcagcctctgttcttgtatttcttatgatctctgatgggctcttttcaaaaatgccaagtggaagcctttgtggcatgctccagagttaaatccagctgaggctccttttgttttcagttccgtgtaacaatctggaaggaaacttcacggacagtaagactgctggagaagagaagcctgtcagcccattttaggtctggggaatcatgtaaggggtacccagacctcacttttagtcatttacatcagtgagttctttcgaggaacagccaaacccagaatttggtgcaaaacccaaacatcttggtgggatttgataaatgccttgggacctggagtgctgggcttgtgcacaggaagagcaccagccgctgagtcaggaccctgtcagttccatgaactattcctctttggtttggctttttgatatgattaaaattattttttattcctttttctactgtgtcttcaacaccaattcctgatagtccaaggaaccacctttctctctgggtatatttaactccgtctttggcccgacaacagtcttctgcccgtgtctgggagcacacgccaggaggaatgtctggtaccctgtgcatccagcatcagaaggtcccaaatggtaaccactttaagagcagatgactcagaaccctccagaggaatctgtttgcttcctgattagatccagtcaatgttttacaggtattgtcagagaaaagcagagggtctgaactagccatataaggagtcgctctagctggtacctgtaaaagttgtgggaattgtgacccccatccgaaggggattccaaaatttctctcaataaacttaacattagccagggaggttctggctaacgttaaatgctgctatacaactgctttgcaacagttgctggtatatttaaatcattaaatttcagcatttactaatactgca

SEQ ID NO: 30 - DNA, 3346 bp, Macaca fascicularis
  misc_feature 1..3346: note = Reverse Complement of SEQ ID NO:29
  source 1..3346: mol_type = genomic DNA
tgcagtattagtaaatgctgaaatttaatgatttaaatataccagcaactgttgcaaagcagttgtatagcagcatttaacgttagccagaacctccctggctaatgttaagtttattgagagaaattttggaatccccttcggatgggggtcacaattcccacaacttttacaggtaccagctagagcgactccttatatggctagttcagaccctctgcttttctctgacaatacctgtaaaacattgactggatctaatcaggaagcaaacagattcctctggagggttctgagtcatctgctcttaaagtggttaccatttgggaccttctgatgctggatgcacagggtaccagacattcctcctggcgtgtgctcccagacacgggcagaagactgttgtcgggccaaagacggagttaaatatacccagagagaaaggtggttccttggactatcaggaattggtgttgaagacacagtagaaaaaggaataaaaaataattttaatcatatcaaaaagccaaaccaaagaggaatagttcatggaactgacagggtcctgactcagcggctggtgctcttcctgtgcacaagcccagcactccaggtcccaaggcatttatcaaatcccaccaagatgtttgggttttgcaccaaattctgggtttggctgttcctcgaaagaactcactgatgtaaatgactaaaagtgaggtctgggtaccccttacatgattccccagacctaaaatgggctgacaggcttctcttctccagcagtcttactgtccgtgaagtttccttccagattgttacacggaactgaaaacaaaaggagcctcagctggatttaactctggagcatgccacaaaggcttccacttggcatttttgaaaagagcccatcagagatcataagaaatacaagaacagaggctgcatagctcgaggtgcttggatattcattctaggttcttgttcttgagaaagtgggttaggtgggtacatgccaagatccaagtaggtcaaccttccacccttaacccacttctctgacatcggagtgctgggaggccttgttctctcgctctgtcccagtctcacattcagacctccaccaatggcacgtttcataagctgccaatgttggggaagctcttcagtttctcaggaaagtcgtctttgtacaggacagggtcagctcggtgttccaccaccttgagaggcatggtcccaaagactgaagcaaacttgttgatgcactctgacctctccaccatgtgtgtttggtctagcgaaagcccatctatggctgtgcactcaggacacttgaatttctttcgtggggttaccttgataactgcttttcccgtgacgttggccaccaggaagttcatggcaatatcttcacagttcatatgagcatctacccagttcttgatatccccaggcattttgtaggtatacaggtaattaaaatacttgtgataaaaagctgccccggtgagcaccatggacacttcattcgtccactcagactcgtacttccacttattcatctcatggtcccagagatgcagacgacccgggtaacccaccaaccggtcaggaaattctcgccagacctcataaccaaattgcagctcgtcagaggtcagcataatgatgtcatcatcaatggccagaacagcttccgtctcgatttcatcataagggaagaaacggttacttaacttgttttcagcagtcctcacaacttttaatggaacccggattttgggccagagagaatcttctggagggtttttattctgattattccagacgacaagcagtttggatagactgggcaccttggacacttcagtgatgacccggaagaggctctctactcggtcgtaagtgaggactatggcggtgaacccttgagactgtggtgggatcagcgggaggaagagtggattgctcacactgccccacttcacagcaggagggtcattccattcttcataggagatggcagcatatggatagatccggtcattgataatctgcagggtggccagggcaatggctttaattgactggaagtacgcttcccagaaccaccgggcctgtctctgcatttcttcaatctgtctttgagggatgctctgcaaaatactgtacacatctgacatcttttcttctggtacaaccacagatgctctcttccagtcaagaacttcagagaaaggcaaaatataggagtctgcaatgacaactgggacacaaccagcttgtaacacatcgctcaacattgcctggcccagccgagctccacgaaggaccacacagaaagtagcctcctgtagcacctgtgggtaatcgaagacctggtgcttgtggcagcgcttacggatagaaaggccaccctctgagaggttggtgcatttatcaagcactaacactgactctccgtgtttgacctggagggcttctaggtcttctctgtactcgggatggagacccacctgagacgatatgaggaagtatcgccgcggacctggtcctttctctggaagatccacctcagctgacagtggactatagacaggaatgctgacatcgtagccttgccggtaagtccacgtagaaaagccgccgccagctaacagggccctgtctctggggacatccagggccgtgttataatctgggggacctccaggcaacatgttgaacaacaggtgatttgtacctcgatcccacctagagagctgggccaacgcttgcgctgtctccttgatgcggagtgtgttctggttaagcacatcgatggagggaacaaacaggcaggcccggttgatgtcatcagtgtagtagtcactgtctgagatggctgtgagcagttcattatactcccgggagatggtgttgctgacagggacgccaaagtcatccacgtactttttcagagcatagatatacaccttgattttgttctttgggttgaagccacagcggtagacatcaaaacatgtgtgcattctgcaactgagatccccgcgctctgggatgggactgtcggctggcagcctgaccaccggcacatcacggacgctacgcttctctacattccagtcatttgaggactcgatagaatggggccagaactgaaacatgccagtggcaatgaggcccaggaggacaatggagaagagggtgatatagtagattcggtgcttggtcttcattcttgggatgagggcaggaccccggatattatacttgaccgacgcacacataatgacacagacagcctctttctcacactcctgatgtaaaggacgagttgatg

SEQ ID NO: 31 - DNA, 3758 bp, Homo sapiens
  misc_feature 1..3758: note = >NM_003635.4 Homo sapiens N-deacetylase and N-sulfotransferase 2 (NDST2), transcript variant 1, mRNA
  source 1..3758: mol_type = genomic DNA
agagcgttcgctcggagatggcggagcagccgcgacgcggcccgtggccccgaaagcagggaagccgggcagccccgggacgcggcggagcccggggacagcggggacgccgcccagtcctccgggtatgaagctaaaatgcagcggctaagaacgcggctctggagcttgacaggcctgacgtcgaatcccagccctcccaccaactgagctgtgtgatcctgggcaaggtagaggggaagagattgaactttgctgacctttgatgtgaggcgctcagccagggccaaggggagagcctggcaagatttgcagcctgaagccatgggccagggggccatggtgacctgagacaagtggactctgtatagttgccccctgcttccccttctacctcccctaccctatgctaaggggactcgtctccacctcgtaaaggaaactccccaagggaatccctgtcccctattttcctatccttctacccttccaagacagtcctagcctatagaactcctacctcccatcccctgaggtggtccccattcctccctcccttcctccccccgccatgctccagttgtggaaggtggtacgcccagctcggcagctggaactgcaccgcctcatactgctgctgatcgctttcagcctgggctccatgggcttcctggcttattatgtgtccaccagccctaaggccaaggaacccttgcccctgcccttgggagactgcagcagcggtggggcagctggtcctggccctgcacggcctccagttccacctcggccccccaggcctccagagacagctcgaactgaacccgtggtccttgtgtttgtggagagtgcatactcacagctggggcaggaaattgtggccatcctggagtctagtcgttttcgttatagcactgagttggcacctggccgaggggacatgcccacattgactgataatacccatggccgctatgtcttggtcatttatgagaacctgctcaagtatgtcaacctggatgcctggagtcgggaactgctagaccggtactgcgtggagtatggtgtgggcatcattggctttttccgagcccacgagcacagcctactgagcgcccagctcaagggctttcccctttttttacactcaaacttggggctccgggactaccaagtgaatccttctgccccgctactgcatctcacacgccccagccgcctagaaccagggccactgcctggtgatgactggaccatcttccaatccaatcatagtacatatgaaccagtgcttcttgccagccttcggccagctgagcccgcagtgccaggaccagttcttcgtcgggcccggcttcccactgtggtacaggacctggggcttcatgatggcatccagcgggtgctctttggacatggcctttccttctggctccacaaacttatcttcgttgatgctgttgcatacctcactggcaagcgcctctgcctggaccttgaccgctacatcttggtagacatcgatgacatctttgtgggcaaggaagggacccgcatgaaggtggctgatgttgaggctctgttgaccacccagaacaaactcaggaccttagttcccaacttcaccttcaacttgggcttctcgggcaagttctatcatactgggacagaggaggaggatgcaggggacgacatgctgctgaagcaccgcaaagagttctggtggttcccccacatgtggagccacatgcagccacacctgttccacaatcgctccgtgctggctgaccagatgaggctcaacaaacagtttgctctggagcatgggattcccacggacctggggtatgctgtggccccccaccactcgggtgtgtaccccatccacacgcagctctatgaggcctggaaatccgtgtggggcatccaggtgaccagcactgaggagtatccccatctccgccctgcccgctaccgccgtggcttcattcacaatggcattatggtgctgccccggcagacatgtggcctcttcactcacacaatcttctataatgagtatcctggaggctctcgtgaactagaccggagcatccgaggtggagagctctttctgacagtgctgcttaatccgatcagcatctttatgacccatctgtccaattatggaaatgaccggctgggcctatacacctttgagagcttggtgcgcttcctccagtgttggacacggctgcgcctacagacccttcctcctgtcccacttgcacagaagtactttgaacttttccctcaggagcgaagccccctttggcagaatccctgtgatgacaagaggcacaaagatatctggtccaaggagaaaacctgtgatcgtctcccgaagttcctcattgtgggaccccagaaaacagggactacagctattcacttcttcctgagcctgcacccagctgtaactagcagcttccctagccccagcacatttgaggagattcagttcttcaacagccctaattaccacaagggtattgactggtacatggatttcttccctgttccttccaatgccagcactgatttcctatttgaaaaaagtgccacctactttgactctgaagttgtaccacggcggggggctgccctcctgccacgagccaagatcatcacagtgctcaccaaccctgctgacagggcctactcctggtaccagcatcagcgagcccatggagacccagttgctctgaactataccttctatcaggtgatttcagcctcctcccagacccctctggcactacgctccctgcagaaccgctgtcttgtccctggctactattctacccatctacaacgctggctgacttactacccctctggacagttgctgattgtggatgggcaagagctgcgtaccaacccagcagcctcaatggagagcatccagaagttcctgggtatcacaccctttctgaactacacacggaccctcaggtttgatgatgataagggattttggtgccagggacttgaaggtggtaagactcgctgtctaggccggagcaaaggccggaggtatccagatatggacactgagtcccgtcttttccttacggattttttccggaaccataatttggagttgtcgaagctgctgagccggcttggacagccagtgccctcgtggcttcgggaagaactgcagcattccagtctgggctgatgtcccagcctcccataccagcaaaatgccccctgcttccctaaggggcaggtccagagcagggcccacaagggggattagagtggcctggcccctccccctctacctcagtagcccccaggcctgagatggctgagaagggaagggtatccttttcccacagttctgggacaaataaaggggcttcctttggtaccccacataatagtgctaggtacctttgacccatcatcttgggaggtggggaggaatgagagggtccaggcagggtgtaggggaatgtattagtccaatgagatttccctcttcatccgcagcagtgtatctattctatacctggctatgggagagaccccttgcatgggagggaccccttgctatggcccctttagccaggcagtgggatctacctgtggcccggcctccctaatgtcattcacattgaatggggatgaggtcggacagtggctcatagagccgagtatgagccctagctgtgggctagaaatgtccttaataaacatccttatttttc

SEQ ID NO: 32 - DNA, 3758 bp, Homo sapiens
  misc_feature 1..3758: note = Reverse Complement of SEQ ID NO:31
  source 1..3758: mol_type = genomic DNA
gaaaaataaggatgtttattaaggacatttctagcccacagctagggctcatactcggctctatgagccactgtccgacctcatccccattcaatgtgaatgacattagggaggccgggccacaggtagatcccactgcctggctaaaggggccatagcaaggggtccctcccatgcaaggggtctctcccatagccaggtatagaatagatacactgctgcggatgaagagggaaatctcattggactaatacattcccctacaccctgcctggaccctctcattcctccccacctcccaagatgatgggtcaaaggtacctagcactattatgtggggtaccaaaggaagcccctttatttgtcccagaactgtgggaaaaggatacccttcccttctcagccatctcaggcctgggggctactgaggtagagggggaggggccaggccactctaatcccccttgtgggccctgctctggacctgccccttagggaagcagggggcattttgctggtatgggaggctgggacatcagcccagactggaatgctgcagttcttcccgaagccacgagggcactggctgtccaagccggctcagcagcttcgacaactccaaattatggttccggaaaaaatccgtaaggaaaagacgggactcagtgtccatatctggatacctccggcctttgctccggcctagacagcgagtcttaccaccttcaagtccctggcaccaaaatcccttatcatcatcaaacctgagggtccgtgtgtagttcagaaagggtgtgatacccaggaacttctggatgctctccattgaggctgctgggttggtacgcagctcttgcccatccacaatcagcaactgtccagaggggtagtaagtcagccagcgttgtagatgggtagaatagtagccagggacaagacagcggttctgcagggagcgtagtgccagaggggtctgggaggaggctgaaatcacctgatagaaggtatagttcagagcaactgggtctccatgggctcgctgatgctggtaccaggagtaggccctgtcagcagggttggtgagcactgtgatgatcttggctcgtggcaggagggcagccccccgccgtggtacaacttcagagtcaaagtaggtggcacttttttcaaataggaaatcagtgctggcattggaaggaacagggaagaaatccatgtaccagtcaatacccttgtggtaattagggctgttgaagaactgaatctcctcaaatgtgctggggctagggaagctgctagttacagctgggtgcaggctcaggaagaagtgaatagctgtagtccctgttttctggggtcccacaatgaggaacttcgggagacgatcacaggttttctccttggaccagatatctttgtgcctcttgtcatcacagggattctgccaaagggggcttcgctcctgagggaaaagttcaaagtacttctgtgcaagtgggacaggaggaagggtctgtaggcgcagccgtgtccaacactggaggaagcgcaccaagctctcaaaggtgtataggcccagccggtcatttccataattggacagatgggtcataaagatgctgatcggattaagcagcactgtcagaaagagctctccacctcggatgctccggtctagttcacgagagcctccaggatactcattatagaagattgtgtgagtgaagaggccacatgtctgccggggcagcaccataatgccattgtgaatgaagccacggcggtagcgggcagggcggagatggggatactcctcagtgctggtcacctggatgccccacacggatttccaggcctcatagagctgcgtgtggatggggtacacacccgagtggtggggggccacagcataccccaggtccgtgggaatcccatgctccagagcaaactgtttgttgagcctcatctggtcagccagcacggagcgattgtggaacaggtgtggctgcatgtggctccacatgtgggggaaccaccagaactctttgcggtgcttcagcagcatgtcgtcccctgcatcctcctcctctgtcccagtatgatagaacttgcccgagaagcccaagttgaaggtgaagttgggaactaaggtcctgagtttgttctgggtggtcaacagagcctcaacatcagccaccttcatgcgggtcccttccttgcccacaaagatgtcatcgatgtctaccaagatgtagcggtcaaggtccaggcagaggcgcttgccagtgaggtatgcaacagcatcaacgaagataagtttgtggagccagaaggaaaggccatgtccaaagagcacccgctggatgccatcatgaagccccaggtcctgtaccacagtgggaagccgggcccgacgaagaactggtcctggcactgcgggctcagctggccgaaggctggcaagaagcactggttcatatgtactatgattggattggaagatggtccagtcatcaccaggcagtggccctggttctaggcggctggggcgtgtgagatgcagtagcggggcagaaggattcacttggtagtcccggagccccaagtttgagtgtaaaaaaaggggaaagcccttgagctgggcgctcagtaggctgtgctcgtgggctcggaaaaagccaatgatgcccacaccatactccacgcagtaccggtctagcagttcccgactccaggcatccaggttgacatacttgagcaggttctcataaatgaccaagacatagcggccatgggtattatcagtcaatgtgggcatgtcccctcggccaggtgccaactcagtgctataacgaaaacgactagactccaggatggccacaatttcctgccccagctgtgagtatgcactctccacaaacacaaggaccacgggttcagttcgagctgtctctggaggcctggggggccgaggtggaactggaggccgtgcagggccaggaccagctgccccaccgctgctgcagtctcccaagggcaggggcaagggttccttggccttagggctggtggacacataataagccaggaagcccatggagcccaggctgaaagcgatcagcagcagtatgaggcggtgcagttccagctgccgagctgggcgtaccaccttccacaactggagcatggcggggggaggaagggagggaggaatggggaccacctcaggggatgggaggtaggagttctataggctaggactgtcttggaagggtagaaggataggaaaataggggacagggattcccttggggagtttcctttacgaggtggagacgagtccccttagcatagggtaggggaggtagaaggggaagcagggggcaactatacagagtccacttgtctcaggtcaccatggccccctggcccatggcttcaggctgcaaatcttgccaggctctccccttggccctggctgagcgcctcacatcaaaggtcagcaaagttcaatctcttcccctctaccttgcccaggatcacacagctcagttggtgggagggctgggattcgacgtcaggcctgtcaagctccagagccgcgttcttagccgctgcattttagcttcatacccggaggactgggcggcgtccccgctgtccccgggctccgccgcgtcccggggctgcccggcttccctgctttcggggccacgggccgcgtcgcggctgctccgccatctccgagcgaacgctct

SEQ ID NO: 33 - DNA, 7945 bp, Homo sapiens
  misc_feature 1..7945: note = >NM_001301063.2 Homo sapiens N-deacetylase and N-sulfotransferase 1 (NDST1), transcript variant 2, mRNA
  source 1..7945: mol_type = genomic DNA
attcattctgttctcccggccccgaagggatgacgaggccctgagcaccgatccatgcccacgcctgtggatgaaagctgatatgaggaggcccaggggacctgagggagtcggctccctctgctacctcctgtctcttgagtatcctgtgatcgtgacctgtccattcccaccagtgcaggggtccatgagcccccaaagccttagccccgtgggccccacggagtgagcggcatgcagcacccccgggcctgtccagtgtcctctggcctgctgccctgcacccccagaaggccctgacgccctggggcacttctgctctgcacaggaccacgcgggggtttgccatggtgacataaaggggcgcggaggaaggaaggagcgtgaccagcctgtggactgcgcccctggctgggaggaaggactgggggcccagatcctccactcccagtgccccacaagggcgtcgcttcctaagtctctgtgaatttgttggtcagtggacgattctcgtgtctcctcctgtgtggggccttggggtagccagggcaggccgggcctccggtggccaaggtctcggaggccaggatgcctgccctggcatgcctccggaggctgtgtcggcacgtgtccccgcaggctgtccttttcctgctgttcatcttctgcctgttcagcgttttcatctcggcctactacctatatggctggaagcgaggcctggagccctcggcggatgcccccgagcctgactgcggggacccgccgcctgtggcccccagtcgcctgctgccactcaagcctgtgcaggcagccaccccttcccgcacagacccgttggtgctggtctttgtggagagcctctactcgcaactgggccaggaggtggtggccatcctggagtccagccgcttcaaataccgcacagagattgcgccgggcaagggtgacatgcccacgctcactgacaagggccgtggccgcttcgccctcatcatctatgagaacatcctcaagtatgtcaacctggacgcctggaaccgggagctgctggacaagtactgtgtggcctacggcgtgggcatcattggcttcttcaaggccaatgagaacagcctgctgagtgcgcagctcaagggcttccccctgttcctgcactcaaacctgggcctgaaggactgcagcatcaaccccaagtccccgctgctctacgtgacgcgacctagcgaggtggagaaaggtgtgctccccggcgaggactggacggttttccagtcaaatcactccacctatgagccagtgctgctggccaagacgcgctcgtctgagtccatcccacacctgggcgcagacgccggcctgcatgctgcactgcacgccactgtggtccaggacctgggcctgcacgacggcatccagcgcgtgctgtttggcaacaacctgaacttctggctgcacaagcttgtcttcgtggatgccgtggccttcctcacggggaagcgcctctccctgccattggaccgctacatcctggtggacattgatgacatcttcgtgggcaaggagggcacacgcatgaaggtggaggacgtgaaggccctgtttgacacacagaacgaactacgcgcacacatcccaaacttcaccttcaacctgggctactcagggaaattcttccacacaggtaccaatgctgaggacgctggggatgatctgctgctgtcgtatgtgaaggagttctggtggttcccccacatgtggagccacatgcagccccaccttttccacaaccagtccgtgttggccgagcagatggccttgaacaagaagttcgctgtcgagcatggcattcccacagacatggggtatgcagtggcgccccaccactcgggcgtgtaccccgtgcacgtgcagctgtacgaggcttggaagcaggtgtggagcatccgcgtgaccagcacggaggagtacccccacctgaagccagcccgctaccgccgtggcttcatccacaatggcatcatggttctcccacggcagacctgcggcctcttcacacacaccatcttctacaacgagtaccctggcggctccagtgagctggacaagatcatcaacgggggcgagctcttcctcaccgtgctcctcaatcctatcagcatcttcatgacgcacctgtccaactatgggaatgaccgcctgggcctgtacaccttcaagcacctggtgcgcttcctgcactcctggacgaacctccggctgcagacactgccccctgtgcagttggcgcagaagtacttccagatcttctccgaggagaaggacccgctctggcaggacccctgcgaggacaaacgtcacaaagacatctggtccaaggagaagacgtgtgaccgcttcccaaagctcctcatcatcggcccccagaaaacaggcaccactgccctctacctgttcctgggcatgcaccctgacctaagcagcaactaccccagctctgagacctttgaggagatccagttttttaatggccacaactatcacaaaggcatcgactggtacatggagttcttccccatcccttccaacaccacctccgacttctactttgagaaaagcgccaactactttgattcagaagtggcgccccggcgggcagcagccctcttgcccaaagccaaggtcctgaccatcctcatcaaccccgcggaccgggcctattcctggtaccagattctggtcttggatggcaaactgcttcgcacagaacctgccaaagtgatggacatggtgcagaagttccttggggtgaccaacaccattgactaccacaaaaccttggcgtttgatccaaagaaaggattttggtgccaactgcttgaaggaggaaaaaccaagtgtctgggcaaaagcaagggccggaaatatcccgagatggacttggattcccgagccttcctgaaggactattaccgggaccacaacatcgagctctccaagctgctgtataagatgggccagacacttcccacttggctacgagaggacctccagaacaccaggtagccgtggccaccacagccagactgaacgtttgtgaaagctgggacatcccaccacacgctgagccagacctgcagagtgggaagctggaccagggcagctgcgcacttatgagcaatactctgtggaggtctggtggggctgggggagcacccaggcggatctgcaagcacctcggagcacccaccgctgggtctgcggcctaagggacctccctcgccagcagaggtccattccgttcccagctgctcctggggaggccgcttcctggtaggagggagtccacgagactcttttctgtccctcactgtgttccgccgactgtcccctctcgtcacccatcactccctgcttccgcagggcgcccctcagtattcgctgccatatgtccctgtcctccaggctgtaggggaggagagcctggccgggggagacagactggacatttccctgtttcgagccaggctcttccaaggggccagctgggtccccggagtcagtcctaggctggatgggagggtggccccctcaagaggactcccagcctccacatctggttcctaccttcacatctcaccctcccgttctggggaagaatttctggttcctacagtatccactccatcctcaaggcttcccgcagggccttggggcactgccttgccatcgggcccagttctccgggccccacctgcacccctttcttccccctgggatatgatgtgtggtgtttcctgtggtaaaagactgaggcaggccaggggtctgccagtaacatgttcccatgtacagacacggtccccacaccctcccagcctcaggcccaggcagacatgggcgagctggtgagactgccagccacggctttgcttagccacctgtggccgagggctctcagagacccccttaacctcccaaatactaagaagctaaaatattttaatattttgtttttttttttcttggtgccagagtttataccctgggtgctggggtcgcactgtgttatatatatatatatatatatataatgtgtatatatatatattctattttttttggttgggttcgtttttaattcagtcctacaaaatggtggtaagccccagtctcaggggtcaccctgtcttagagctagagatgaggtggcagggagggaggctgtgtcctcagtggcctggggctgagcagaccttaggaaggggccctccccagtgccgtggctgctctggggctaccccaggtgaacagaggtggtgagatgcgcagggaagaccagctctctccaggacatcgggctgcgtgaagtccagtgaccctgaggggattttggccaaaggaaacagccagggctgggctaggagagctggggtcaaaagctgccccacccactctccctcacatggtgctaggctgggagctgccctgagagctgggatgcccaccaaggcccacagaactgtctccaggcccttgtagacagtgggatctctgggctgatttctggttggggtctgctcctaccccaccccatttaacaatgtgaagtgactgaggctggggtgcctctccctggccccctccaactgccaaattctgcttccctctgaaccccaggaaatactttctggagaggcttgtcttgttcagaagactctagcatcttggggctggaaggtcctttgacgggtatgaaacaggtccagaaaggggaggtggcctgcttggccgacgtcatggagccagctgggagcagggctgagcgttgaacccgaggctcccggttccaagtcccatcgtgctcctcttccaatgccacactgcctctgagcccatccttgggaccctactctgtgccaggttcctgtcccttcctccgtcacagcatggtcattccaggatatggggacaaaccactccttcccagccagggtgcctttgagccttctcattccgaggtctgcgtttgcatccctgtcgtgttctccctcgaggggtccttccccagcctgtgggggcctgggtctgttctgagctgattcccttttctccagttctctgctgggatgaagaaagttggacactcagtgggaccagctgcaggtggtttcactgtgtacacagcagtgtccccatcatgcctctcaatggggcctgcaagcctgggaacttgggcatcgttgggccagcaggatgagcagcaaagggtctgaggacagggtggcatgtctgcttgtgtgctcatgaagacatgcccacgccatggagccaggggcttatagagaggggcagtgacttccagagtcccatccgtcagtgaggggactgggctgcgggatgggtgaggatcttacagctcccaggttcggaaatctaccctctaggcctggaggcctctctcgcagagcatggaaggcaggagaggtgggctggcctagggcaggagctccacttctctctgcctctggctatgggaaggagcaggcggttggaaatcctgtgacagcagagatcttctggatttttgcctggacccttctgcaagcctggagactggacctgccacatgttccaagtctgtctgcctaggtcactgctgccacttctcctcccactaacagacctttcttgaagacccactaggtccagacactgccgggacttgcaggtatggggggtagaaggagaggcagataagctgcctggggggctgttagctaatgggtacaaggacaccccctcccgagaagagaagccacagatgagtgggccagcgaggccagtcttcaatgtccactaattcactctaagcatttggccaaaaaaaggagagagaaataactgaaattgttcaggtggctccatcgtctattctgtggtcccctccatgagcctttgccccagggtgggtgcaggtgcgagtgtcacctgcagctgcctcagtcattcagagttccagagccttctgtggtggagcatcctgctgcttggaggatgagtctgaagtttaaaaatgggccttttctgagcccccctgatgagcagtcagtgcttctgggcccagctaaggaagccatctgttcccagcagaggagagctgctgcgctgacctgcagaggttggtggtcccagcacagagctgtgcccatgggcttgttagtgggaaaagcaaatacaacaatgttttaccaaacatttaattatgaatgcccactccccagcatctagatctaaaattattaacattttgccacattctttttctctctctgtgtatgtatatgttttctctgtcctaatttaaaagtacattgcaaacatcatgaaacttgatccctgaaagcttcagcctgcatctcctaagagttagggcattgtcctacacattggcccagtatcacagccaagacgagaagtcatttcccagcgatgtctgctatctaatctgtattcaaatccccccaattgtctcccaggtaacttatgtgtctggttttggaatcagcatccagtcacggtgcacacattgcattttctaactatgtttttaaaacctctttgaatgctgaaaggtcttccctcagctcactttgagtttttaaatgacattgtttttgaggccctaggcctgctgtctttttgaagccccacattctgaatttgtcagattgtttgctcatggtgtcgcataaccacttcttctatcccctgtactttcaaggataatttaggctacatgagattttgccttttgtgctgacttgacagcttcacttctgcctaagatgcgcctccactgtcacctgtaccaagtgccaaaacagcagaggggccagttagagcaagagctctgggggggccggaaagtctccctggagaaggccgtaatatctgggccttggaaggaaggacacagggctctggaaggaggaggctgcatgcctgaaggctgggccttcgaccctggggatgggccacagggcaccaaacacatcatatgtctctctctttctattttggggtcccagggttttcatttcctggagacccgtggtctgtgtgcactggagcagagccaggctctcagttgcagcagggaaaagcctacatggggaactgcctcccgcaagctgtggtgtgagaagagccctggctggcagcaggagctgtgaagtttcatcccagccgggtgcatttagtagctgcctgaccatcttcctcccaggccctcagtttcttcatctgtagaatgagcagataggggccacagcagggattttcacacatcaaaggaggcagcctctgctctagttgatgtgaggatgagggggcggcctagaccccctgctgcccaggccgttgaggcaacactgggttcctggcttgacagctgtgggctggctgcccttgccagctcagacggctggcgagttttcagcttccctaagggactggcatagggttttgtggggtcaatgccaggaacctgggggaaactggatgcgttttatcctaagaagttcatccctcctgctcttactgtttccggccctggaggagaatgagggaggagagggttttctatgactgtgttagcttttattattagcaagagggctccttttgtaatttgtgcatgaaattcatgtcatttcctgggagaggagagggccgactggagagggtggggggcacactggggaagcaggcagaggtttccttcccttgtaggggggtggggagagtggggagagggggtgctatccagttcgcctgatgagggctctcgaaccagccgttttgggttgtgttaaaggtgagaccttcctccattaatgtacaatctcgaactaactgctaataaagtggggttctgtttgta

SEQ ID NO: 34 - DNA, 7945 bp, Homo sapiens
  misc_feature 1..7945: note = Reverse Complement of SEQ ID NO:33
  source 1..7945: mol_type = genomic DNA
tacaaacagaaccccactttattagcagttagttcgagattgtacattaatggaggaaggtctcacctttaacacaacccaaaacggctggttcgagagccctcatcaggcgaactggatagcaccccctctccccactctccccacccccctacaagggaaggaaacctctgcctgcttccccagtgtgccccccaccctctccagtcggccctctcctctcccaggaaatgacatgaatttcatgcacaaattacaaaaggagccctcttgctaataataaaagctaacacagtcatagaaaaccctctcctccctcattctcctccagggccggaaacagtaagagcaggagggatgaacttcttaggataaaacgcatccagtttcccccaggttcctggcattgaccccacaaaaccctatgccagtcccttagggaagctgaaaactcgccagccgtctgagctggcaagggcagccagcccacagctgtcaagccaggaacccagtgttgcctcaacggcctgggcagcagggggtctaggccgccccctcatcctcacatcaactagagcagaggctgcctcctttgatgtgtgaaaatccctgctgtggcccctatctgctcattctacagatgaagaaactgagggcctgggaggaagatggtcaggcagctactaaatgcacccggctgggatgaaacttcacagctcctgctgccagccagggctcttctcacaccacagcttgcgggaggcagttccccatgtaggcttttccctgctgcaactgagagcctggctctgctccagtgcacacagaccacgggtctccaggaaatgaaaaccctgggaccccaaaatagaaagagagagacatatgatgtgtttggtgccctgtggcccatccccagggtcgaaggcccagccttcaggcatgcagcctcctccttccagagccctgtgtccttccttccaaggcccagatattacggccttctccagggagactttccggcccccccagagctcttgctctaactggcccctctgctgttttggcacttggtacaggtgacagtggaggcgcatcttaggcagaagtgaagctgtcaagtcagcacaaaaggcaaaatctcatgtagcctaaattatccttgaaagtacaggggatagaagaagtggttatgcgacaccatgagcaaacaatctgacaaattcagaatgtggggcttcaaaaagacagcaggcctagggcctcaaaaacaatgtcatttaaaaactcaaagtgagctgagggaagacctttcagcattcaaagaggttttaaaaacatagttagaaaatgcaatgtgtgcaccgtgactggatgctgattccaaaaccagacacataagttacctgggagacaattggggggatttgaatacagattagatagcagacatcgctgggaaatgacttctcgtcttggctgtgatactgggccaatgtgtaggacaatgccctaactcttaggagatgcaggctgaagctttcagggatcaagtttcatgatgtttgcaatgtacttttaaattaggacagagaaaacatatacatacacagagagagaaaaagaatgtggcaaaatgttaataattttagatctagatgctggggagtgggcattcataattaaatgtttggtaaaacattgttgtatttgcttttcccactaacaagcccatgggcacagctctgtgctgggaccaccaacctctgcaggtcagcgcagcagctctcctctgctgggaacagatggcttccttagctgggcccagaagcactgactgctcatcaggggggctcagaaaaggcccatttttaaacttcagactcatcctccaagcagcaggatgctccaccacagaaggctctggaactctgaatgactgaggcagctgcaggtgacactcgcacctgcacccaccctggggcaaaggctcatggaggggaccacagaatagacgatggagccacctgaacaatttcagttatttctctctcctttttttggccaaatgcttagagtgaattagtggacattgaagactggcctcgctggcccactcatctgtggcttctcttctcgggagggggtgtccttgtacccattagctaacagccccccaggcagcttatctgcctctccttctaccccccatacctgcaagtcccggcagtgtctggacctagtgggtcttcaagaaaggtctgttagtgggaggagaagtggcagcagtgacctaggcagacagacttggaacatgtggcaggtccagtctccaggcttgcagaagggtccaggcaaaaatccagaagatctctgctgtcacaggatttccaaccgcctgctccttcccatagccagaggcagagagaagtggagctcctgccctaggccagcccacctctcctgccttccatgctctgcgagagaggcctccaggcctagagggtagatttccgaacctgggagctgtaagatcctcacccatcccgcagcccagtcccctcactgacggatgggactctggaagtcactgcccctctctataagcccctggctccatggcgtgggcatgtcttcatgagcacacaagcagacatgccaccctgtcctcagaccctttgctgctcatcctgctggcccaacgatgcccaagttcccaggcttgcaggccccattgagaggcatgatggggacactgctgtgtacacagtgaaaccacctgcagctggtcccactgagtgtccaactttcttcatcccagcagagaactggagaaaagggaatcagctcagaacagacccaggcccccacaggctggggaaggacccctcgagggagaacacgacagggatgcaaacgcagacctcggaatgagaaggctcaaaggcaccctggctgggaaggagtggtttgtccccatatcctggaatgaccatgctgtgacggaggaagggacaggaacctggcacagagtagggtcccaaggatgggctcagaggcagtgtggcattggaagaggagcacgatgggacttggaaccgggagcctcgggttcaacgctcagccctgctcccagctggctccatgacgtcggccaagcaggccacctcccctttctggacctgtttcatacccgtcaaaggaccttccagccccaagatgctagagtcttctgaacaagacaagcctctccagaaagtatttcctggggttcagagggaagcagaatttggcagttggagggggccagggagaggcaccccagcctcagtcacttcacattgttaaatggggtggggtaggagcagaccccaaccagaaatcagcccagagatcccactgtctacaagggcctggagacagttctgtgggccttggtgggcatcccagctctcagggcagctcccagcctagcaccatgtgagggagagtgggtggggcagcttttgaccccagctctcctagcccagccctggctgtttcctttggccaaaatcccctcagggtcactggacttcacgcagcccgatgtcctggagagagctggtcttccctgcgcatctcaccacctctgttcacctggggtagccccagagcagccacggcactggggagggccccttcctaaggtctgctcagccccaggccactgaggacacagcctccctccctgccacctcatctctagctctaagacagggtgacccctgagactggggcttaccaccattttgtaggactgaattaaaaacgaacccaaccaaaaaaaatagaatatatatatatacacattatatatatatatatatatatataacacagtgcgaccccagcacccagggtataaactctggcaccaagaaaaaaaaaaacaaaatattaaaatattttagcttcttagtatttgggaggttaagggggtctctgagagccctcggccacaggtggctaagcaaagccgtggctggcagtctcaccagctcgcccatgtctgcctgggcctgaggctgggagggtgtggggaccgtgtctgtacatgggaacatgttactggcagacccctggcctgcctcagtcttttaccacaggaaacaccacacatcatatcccagggggaagaaaggggtgcaggtggggcccggagaactgggcccgatggcaaggcagtgccccaaggccctgcgggaagccttgaggatggagtggatactgtaggaaccagaaattcttccccagaacgggagggtgagatgtgaaggtaggaaccagatgtggaggctgggagtcctcttgagggggccaccctcccatccagcctaggactgactccggggacccagctggccccttggaagagcctggctcgaaacagggaaatgtccagtctgtctcccccggccaggctctcctcccctacagcctggaggacagggacatatggcagcgaatactgaggggcgccctgcggaagcagggagtgatgggtgacgagaggggacagtcggcggaacacagtgagggacagaaaagagtctcgtggactccctcctaccaggaagcggcctccccaggagcagctgggaacggaatggacctctgctggcgagggaggtcccttaggccgcagacccagcggtgggtgctccgaggtgcttgcagatccgcctgggtgctcccccagccccaccagacctccacagagtattgctcataagtgcgcagctgccctggtccagcttcccactctgcaggtctggctcagcgtgtggtgggatgtcccagctttcacaaacgttcagtctggctgtggtggccacggctacctggtgttctggaggtcctctcgtagccaagtgggaagtgtctggcccatcttatacagcagcttggagagctcgatgttgtggtcccggtaatagtccttcaggaaggctcgggaatccaagtccatctcgggatatttccggcccttgcttttgcccagacacttggtttttcctccttcaagcagttggcaccaaaatcctttctttggatcaaacgccaaggttttgtggtagtcaatggtgttggtcaccccaaggaacttctgcaccatgtccatcactttggcaggttctgtgcgaagcagtttgccatccaagaccagaatctggtaccaggaataggcccggtccgcggggttgatgaggatggtcaggaccttggctttgggcaagagggctgctgcccgccggggcgccacttctgaatcaaagtagttggcgcttttctcaaagtagaagtcggaggtggtgttggaagggatggggaagaactccatgtaccagtcgatgcctttgtgatagttgtggccattaaaaaactggatctcctcaaaggtctcagagctggggtagttgctgcttaggtcagggtgcatgcccaggaacaggtagagggcagtggtgcctgttttctgggggccgatgatgaggagctttgggaagcggtcacacgtcttctccttggaccagatgtctttgtgacgtttgtcctcgcaggggtcctgccagagcgggtccttctcctcggagaagatctggaagtacttctgcgccaactgcacagggggcagtgtctgcagccggaggttcgtccaggagtgcaggaagcgcaccaggtgcttgaaggtgtacaggcccaggcggtcattcccatagttggacaggtgcgtcatgaagatgctgataggattgaggagcacggtgaggaagagctcgcccccgttgatgatcttgtccagctcactggagccgccagggtactcgttgtagaagatggtgtgtgtgaagaggccgcaggtctgccgtgggagaaccatgatgccattgtggatgaagccacggcggtagcgggctggcttcaggtgggggtactcctccgtgctggtcacgcggatgctccacacctgcttccaagcctcgtacagctgcacgtgcacggggtacacgcccgagtggtggggcgccactgcataccccatgtctgtgggaatgccatgctcgacagcgaacttcttgttcaaggccatctgctcggccaacacggactggttgtggaaaaggtggggctgcatgtggctccacatgtgggggaaccaccagaactccttcacatacgacagcagcagatcatccccagcgtcctcagcattggtacctgtgtggaagaatttccctgagtagcccaggttgaaggtgaagtttgggatgtgtgcgcgtagttcgttctgtgtgtcaaacagggccttcacgtcctccaccttcatgcgtgtgccctccttgcccacgaagatgtcatcaatgtccaccaggatgtagcggtccaatggcagggagaggcgcttccccgtgaggaaggccacggcatccacgaagacaagcttgtgcagccagaagttcaggttgttgccaaacagcacgcgctggatgccgtcgtgcaggcccaggtcctggaccacagtggcgtgcagtgcagcatgcaggccggcgtctgcgcccaggtgtgggatggactcagacgagcgcgtcttggccagcagcactggctcataggtggagtgatttgactggaaaaccgtccagtcctcgccggggagcacacctttctccacctcgctaggtcgcgtcacgtagagcagcggggacttggggttgatgctgcagtccttcaggcccaggtttgagtgcaggaacagggggaagcccttgagctgcgcactcagcaggctgttctcattggccttgaagaagccaatgatgcccacgccgtaggccacacagtacttgtccagcagctcccggttccaggcgtccaggttgacatacttgaggatgttctcatagatgatgagggcgaagcggccacggcccttgtcagtgagcgtgggcatgtcacccttgcccggcgcaatctctgtgcggtatttgaagcggctggactccaggatggccaccacctcctggcccagttgcgagtagaggctctccacaaagaccagcaccaacgggtctgtgcgggaaggggtggctgcctgcacaggcttgagtggcagcaggcgactgggggccacaggcggcgggtccccgcagtcaggctcgggggcatccgccgagggctccaggcctcgcttccagccatataggtagtaggccgagatgaaaacgctgaacaggcagaagatgaacagcaggaaaaggacagcctgcggggacacgtgccgacacagcctccggaggcatgccagggcaggcatcctggcctccgagaccttggccaccggaggcccggcctgccctggctaccccaaggccccacacaggaggagacacgagaatcgtccactgaccaacaaattcacagagacttaggaagcgacgcccttgtggggcactgggagtggaggatctgggcccccagtccttcctcccagccaggggcgcagtccacaggctggtcacgctccttccttcctccgcgcccctttatgtcaccatggcaaacccccgcgtggtcctgtgcagagcagaagtgccccagggcgtcagggccttctgggggtgcagggcagcaggccagaggacactggacaggcccgggggtgctgcatgccgctcactccgtggggcccacggggctaaggctttgggggctcatggacccctgcactggtgggaatggacaggtcacgatcacaggatactcaagagacaggaggtagcagagggagccgactccctcaggtcccctgggcctcctcatatcagctttcatccacaggcgtgggcatggatcggtgctcagggcctcgtcatcccttcggggccgggagaacagaatgaat

SEQ ID NO: 35 - DNA, 3907 bp, Mus musculus
  misc_feature 1..3907: note = >NM_010811.2 Mus musculus N-deacetylase/N-sulfotransferase (heparan glucosaminyl) 2 (Ndst2), mRNA
  source 1..3907: mol_type = genomic DNA
tgccacccggcgtggaggacggggtccaccctggtgggctgagcgcgaggccggagggctgggaggctgcggctgggctgagcactgcggagggccgtcggcttatcccaggtcccggtcacgcagcggccacgctcggggagcgcgcggacctgagcgggcaccacgagccgcagcgcgccgcctccccctggtgggagcggtacttgagcccgactgcggcggagcgttcgctcggagatggcggagccgccgcgacgcggcccgaggccccgcgagcagggaagccgggcagccccgggacgcggcagggcccggggacagcggggacgccgcccactccaccgggtatgaagctaaaatacagtggttacaacacaggaggttgacaggcctgacctttgaatcccagttcatccacaaacggagctttgtaatctcggattgtaagggccaagcttgtggactttagtgacttctgatctaagaacctccaccagggctgagggagctcaagtttcagcctgaggcatgggccaggaggccatggtgacctgagacccgtggattctgtccagtacaccctgttgctccttctgcctcccctctcctgtattgaaagcgtttgtgttcatcttatcagggacctgaccctaagagaatccttcccctgccaaggcagttccagcccccagaactcatcaccccatctcctgaggtggttcctatcctccctctcttctcctcgccatgctccagctgtggaaggtggtgcgccctgctcggcaactggaactgcaccgcctcatactgctgctgattggtttcagtcttgtctccatgggattcctggcttactacgtgtccaccagccccaaggccaaggaacccttgcctctgcccttgggagactgtagtagcagtggggcagctggccctggccctgcacggccaccagtcccacctcgaccccaaaggcctccagaaacaactcgaacggaacctgtggtccttgtgtttgtggaaagtgcatactcacaactggggcaggagattgtggccatcttggaatctagtcgctttcgttatagcactgagctagcacctggccgaggggatatgcccacactgactgatcatacccatggccgctatgtcttagtcatctatgagaaccttctaaagtatgtgaacttagatgcctggagccgggaactgctggaccggtactgtgtggagtatggcgtgggtatcattggctttttccgagcccgcgagcacagcctgctgagtgcccagctcaagggctttccccttttcctacactcaaacctggggctccgggactaccaagtgaatccttccgcccctctactacatctcacccgccctagccgcctggagccaggaccactgcctggtgatgactggaccatcttccagtccaatcacagcacttatgagcccgtgcttattgccagccatcggccagccgagctctccatgccaggaccagttcttcggcgggcccggctccccaccgtggtgcaggacttggggcttcatgatggcatacagcgggtgctgtttggacatggcctttctttttggcttcacaaacttgtttttgttgatgctgttgcatacctcaccgggaagcgcctctgcctggaccttgaccgctacatcttagtagatatcgatgacatctttgtgggcaaagaaggtactcgcatgaaggtggctgatgttgaggctttgttgaccactcagaacaaactcaggaccttagtccccaacttcaccttcaacttgggcttctcgggcaagttctatcataccgggacagaagaggaggatgctggggacgacatgctgctgaagcaccgcagggagttctggtggttccctcacatgtggagccacatgcagccacacctcttccacaaccgctctgtgctagctgaccagatgaggctcaacaaacagtttgctttggagcatgggattcctacggatctggggtatgctgtggccccccaccactctggcgtgtaccccatccactcgcagctctatgaggcctggaaatctgtctggggcatccaggtgaccagcactgaggagtacccccatctgcgtcctgctcgctaccgccgtggcttcattcacaatggcatcatggtgctcccccggcaaacatgtggcctcttcacccacacgatcttctataatgagtatcctggaggttctcgtgaactagatcgaagcatccgaggtggagagctctttctgacagtgctgcttaatccgatcagtgtctttatgacccatctgtcaaactatggaaatgaccggctgggcctgtacacctttgagagcctggtgcgcttcctccagtgctggacacgactgcgcctacagacccttcctcctgtccctcttgcacaaaagtactttgaactttttcctcaggaacgaagccccctgtggcagaatccctgtgatgacaagaggcacaaagatatctggtccaaggagaaaacctgtgatcgactccccaagttcctcattgtgggaccacagaagacaggcaccacggctattcacttcttcctgagcctgcacccagctgtcacaagcagttttcccagccccagcacctttgaggagattcagttcttcaatggccctaattaccacaaggggatcgactggtacatggacttcttccctgttccttccaatgccagcactgacttcctgtttgaaaaaagtgccacctactttgactcggaggtcgtaccacggcggggggctgcccttctgccaagagccaagataatcactgtgcttatcaaccctgctgacagggcctactcctggtaccagcaccagcgagcacatggagaccccattgctctgaactacaccttctaccaagtgatttcagcttcttctcaggcccctctgctacttcgctccttgcagaaccgttgtcttgttcctggctactattctacccatcttcaacgctggctgacttactatccctctggacagttgctgattatggatgggcaggagcttcgtgtcaacccggcagcctcaatggagatcatccagaagttcctgggtatcaccccctttctgaactacacgaggaccctcaggtttgatgaagataaaggattttggtgccagggccttgaaggtggtaagactcgctgtcttgggagaagcaaaggccggaggtacccagacatggacatggagtctcgccttttccttacggattttttccggaaccataatttggagctatcaaagctgctgagtcggcttggccagccagcccccttgtggcttcgggaagaattgcaacattccagtgtgggctgatgccccagtctttctttaccagcaaaaagcctgctaacttcactgaggggcaagtcttagagcagaacccacagggggattaacatggccccttacccctctacctcagtggcccccaggattggaatggctgaaaagggaggggatccatctctttcccatagttttgggacctaataaaggggcttcccttggcatccccccatggtactaggtacctttgacctatgaacctgggaggtgaggaagagggtcctgggaaggggtaagaagaccatattcagtggtttccttcctcgtgcccagcagtttacctgtcaatgcctacccctgagaggccccttcgctatggcctctttagtcaagacagtgggatctacctgtggcctggcctctctaatgtcattcacattgaatggggatgaggtcagacagttgctcatagagccatatatgagccctagctgtgggctagaaatgtccttaataaacatccttatttttc

SEQ ID NO: 36 - DNA, 3907 bp, Mus musculus
  misc_feature 1..3907: note = Reverse Complement of SEQ ID NO:35
  source 1..3907: mol_type = genomic DNA
gaaaaataaggatgtttattaaggacatttctagcccacagctagggctcatatatggctctatgagcaactgtctgacctcatccccattcaatgtgaatgacattagagaggccaggccacaggtagatcccactgtcttgactaaagaggccatagcgaaggggcctctcaggggtaggcattgacaggtaaactgctgggcacgaggaaggaaaccactgaatatggtcttcttaccccttcccaggaccctcttcctcacctcccaggttcataggtcaaaggtacctagtaccatggggggatgccaagggaagcccctttattaggtcccaaaactatgggaaagagatggatcccctcccttttcagccattccaatcctgggggccactgaggtagaggggtaaggggccatgttaatccccctgtgggttctgctctaagacttgcccctcagtgaagttagcaggctttttgctggtaaagaaagactggggcatcagcccacactggaatgttgcaattcttcccgaagccacaagggggctggctggccaagccgactcagcagctttgatagctccaaattatggttccggaaaaaatccgtaaggaaaaggcgagactccatgtccatgtctgggtacctccggcctttgcttctcccaagacagcgagtcttaccaccttcaaggccctggcaccaaaatcctttatcttcatcaaacctgagggtcctcgtgtagttcagaaagggggtgatacccaggaacttctggatgatctccattgaggctgccgggttgacacgaagctcctgcccatccataatcagcaactgtccagagggatagtaagtcagccagcgttgaagatgggtagaatagtagccaggaacaagacaacggttctgcaaggagcgaagtagcagaggggcctgagaagaagctgaaatcacttggtagaaggtgtagttcagagcaatggggtctccatgtgctcgctggtgctggtaccaggagtaggccctgtcagcagggttgataagcacagtgattatcttggctcttggcagaagggcagccccccgccgtggtacgacctccgagtcaaagtaggtggcacttttttcaaacaggaagtcagtgctggcattggaaggaacagggaagaagtccatgtaccagtcgatccccttgtggtaattagggccattgaagaactgaatctcctcaaaggtgctggggctgggaaaactgcttgtgacagctgggtgcaggctcaggaagaagtgaatagccgtggtgcctgtcttctgtggtcccacaatgaggaacttggggagtcgatcacaggttttctccttggaccagatatctttgtgcctcttgtcatcacagggattctgccacagggggcttcgttcctgaggaaaaagttcaaagtacttttgtgcaagagggacaggaggaagggtctgtaggcgcagtcgtgtccagcactggaggaagcgcaccaggctctcaaaggtgtacaggcccagccggtcatttccatagtttgacagatgggtcataaagacactgatcggattaagcagcactgtcagaaagagctctccacctcggatgcttcgatctagttcacgagaacctccaggatactcattatagaagatcgtgtgggtgaagaggccacatgtttgccgggggagcaccatgatgccattgtgaatgaagccacggcggtagcgagcaggacgcagatgggggtactcctcagtgctggtcacctggatgccccagacagatttccaggcctcatagagctgcgagtggatggggtacacgccagagtggtggggggccacagcataccccagatccgtaggaatcccatgctccaaagcaaactgtttgttgagcctcatctggtcagctagcacagagcggttgtggaagaggtgtggctgcatgtggctccacatgtgagggaaccaccagaactccctgcggtgcttcagcagcatgtcgtccccagcatcctcctcttctgtcccggtatgatagaacttgcccgagaagcccaagttgaaggtgaagttggggactaaggtcctgagtttgttctgagtggtcaacaaagcctcaacatcagccaccttcatgcgagtaccttctttgcccacaaagatgtcatcgatatctactaagatgtagcggtcaaggtccaggcagaggcgcttcccggtgaggtatgcaacagcatcaacaaaaacaagtttgtgaagccaaaaagaaaggccatgtccaaacagcacccgctgtatgccatcatgaagccccaagtcctgcaccacggtggggagccgggcccgccgaagaactggtcctggcatggagagctcggctggccgatggctggcaataagcacgggctcataagtgctgtgattggactggaagatggtccagtcatcaccaggcagtggtcctggctccaggcggctagggcgggtgagatgtagtagaggggcggaaggattcacttggtagtcccggagccccaggtttgagtgtaggaaaaggggaaagcccttgagctgggcactcagcaggctgtgctcgcgggctcggaaaaagccaatgatacccacgccatactccacacagtaccggtccagcagttcccggctccaggcatctaagttcacatactttagaaggttctcatagatgactaagacatagcggccatgggtatgatcagtcagtgtgggcatatcccctcggccaggtgctagctcagtgctataacgaaagcgactagattccaagatggccacaatctcctgccccagttgtgagtatgcactttccacaaacacaaggaccacaggttccgttcgagttgtttctggaggcctttggggtcgaggtgggactggtggccgtgcagggccagggccagctgccccactgctactacagtctcccaagggcagaggcaagggttccttggccttggggctggtggacacgtagtaagccaggaatcccatggagacaagactgaaaccaatcagcagcagtatgaggcggtgcagttccagttgccgagcagggcgcaccaccttccacagctggagcatggcgaggagaagagagggaggataggaaccacctcaggagatggggtgatgagttctgggggctggaactgccttggcaggggaaggattctcttagggtcaggtccctgataagatgaacacaaacgctttcaatacaggagaggggaggcagaaggagcaacagggtgtactggacagaatccacgggtctcaggtcaccatggcctcctggcccatgcctcaggctgaaacttgagctccctcagccctggtggaggttcttagatcagaagtcactaaagtccacaagcttggcccttacaatccgagattacaaagctccgtttgtggatgaactgggattcaaaggtcaggcctgtcaacctcctgtgttgtaaccactgtattttagcttcatacccggtggagtgggcggcgtccccgctgtccccgggccctgccgcgtcccggggctgcccggcttccctgctcgcggggcctcgggccgcgtcgcggcggctccgccatctccgagcgaacgctccgccgcagtcgggctcaagtaccgctcccaccagggggaggcggcgcgctgcggctcgtggtgcccgctcaggtccgcgcgctccccgagcgtggccgctgcgtgaccgggacctgggataagccgacggccctccgcagtgctcagcccagccgcagcctcccagccctccggcctcgcgctcagcccaccagggtggaccccgtcctccacgccgggtggca

SEQ ID NO: 37 - DNA, 3897 bp, Rattus norvegicus
  misc_feature 1..3897: note = >NM_001105740.2 Rattus norvegicus N-deacetylase and N-sulfotransferase 2 (Ndst2), mRNA
  source 1..3897: mol_type = genomic DNA
cgggcaccccgagccgcagcgcgccgcctccccctggtgggagcagtacttgggcccgactgcggcggagcgttcgctcggagatggcggagccgccgcgacgcggcccgaggccccgcgagcagggaagccgggcggccccgggacgcggcggggccccgggacagcggggacgccgcccactccaccggatatgaagctaaaatgcagtggttacaacacaggagtttgacaggcctgacctttgaatcccagttcatccactaacggattgtaagggccgagcgtgtggacttcactgactcctcatgtaagaagctacatcggggctgaggaaaatcaagtttcagcctgaggcatgggccagggggccatggtgacctgagaccagtagattctgtccaggacaccctgttgctctttctgcctcccctgtcctgtactgaaagcgtttgtgttcatctcatcagggaactgaccctaagaggatccttcccctgccaagacagttccagcccacagagctcatacttcccatctcctgaggtggtccctgtccctctgtccctccctcccttctcctcgccatgctccagctgtggaaggtggtacgccctgctcggcaactggaactgcaccgcctcatactgctgctgattggtttcagtcttgtctccatggcattcctggcttactttgtatccaccagccccaaggccaaggaacccttgcctctgcccttgggagactgtagtagcagtggggcagctggccctggtcctgcaaggccaccagtcccacctcgacccccaaggcctccagaaacaactcgaacagaacctgtggtccttgtgtttgtggaaagtgcgtactcacaactggggcaggagattgtggccatcttggagtctagtcgctttcgttacagcactgagttagcacctggccgaggggatatgcccacgctgactgatcacacccatggtcgctacgtgttggtcatctatgagaaccttctaaagtacgtcaacttggactcctggagtcgagaactgctagaccgatactgtgtggagtacggtgtgggcatcattggctttttccgagcccacgagcatagcctcctgagtgcccaactcaagggcttcccccttttcctatactcaaacttggggctgcgggactaccaagtgaacccttccgctcctctgctacatctcacccgccctagccgcttggagccaggaccactgcctggggacgactggaccatcttccagtccaatcacagcacctatgagccagtgctcatcgccagccatcggccagcagagctccccttgccgggaccagctctgcggcgagcccggctccccactgtggtgcaggacttggggcttcatgacggcatccagcgggtgctgtttggacacggcctctctttttggcttcacaaacttgtgtttgtcgatgctgtcgcatacctcactggcaagcgtctctgcctggaccttgaccgctacatcttagtagacatcgacgacatctttgtgggcaaagaaggtactcgcatgaaggtggctgatgttgaggctctgctgactacccagaacaaactcaggaccttagtccccaacttcaccttcaacctgggcttctcgggcaagttctatcatacggggacagaggaggaggacgcgggggacgatatgctgctgaggcaccgcagagagttctggtggttccctcacatgtggagtcacatgcagccacacctgttccacaatcgctccgtgctggccgaccagatgaggctcaacaaacagtttgctttggagcatgggattcctacggatctggggtatgctgtggccccccaccactctggtgtgtaccccatccacacgcagctctatgaggcctggaaatccgtgtggggcattcaggtgaccagcactgaggagtatccccatctgcgccctgctcgctaccgccgaggcttcattcacaatggcatcatggtgctcccccggcaaacatgtggcctcttcactcacaccatcttctataatgagtatcctggaggttctcgtgaactggatcgaagcattcgaggtggagaactctttctgacagtgctgcttaatccgatcagtgtctttatgacccatctgtccaactatgggaacgaccggctgggcctgtacacctttgagagcctggtgcgcttcctccagtgctggacacggctgcggctgcagacccttccccctgtgcctcttgcccagaagtactttgaacttttccctcaggaacgaagccccctttggcagaatccctgtgacgacaagaggcacaaagatatctggtccaaggagaaaacctgtgaccgactccccaagttcctcattgtgggaccacagaagacaggcaccacagccattcacttcttcctgagcctgcaccccgcagtgacaagcagtttccccagccctagcacctttgaggaaattcagttcttcaatggccccaattaccacaagggcatcgactggtatatggacttcttccctgttccttccaatgccagcactgacttcctgtttgaaaagagtgccacctactttgactcagaggttgtacctcggcggggggctgcccttttgccaagagccaagatcatcactgtgctcatcaaccctgctgacagggcctactcctggtaccagcaccagagagcacatggagaccctgttgctctgaactacaccttctaccaagtgatttcagcttcctcccacgcccctctgctgcttcgctccttgcagagccgttgtcttgttcctggctactattctacccaccttcagcgctggctgacttactacccctccggacagttgctgattatggatgggcaggagcttcgtgtcaacccagcagcctcaatggagatcatccagaagttcctgggtatcaccccctttctgaactacacgaggaccctcaggttcgatgcagataaaggattttggtgccagggccttgaaggcgggaagactcgctgtctagggagaagcaaaggccggaggtacccagacatggacatggagtctcgccttttccttacggattttttccgaacccataatttggagctatcaaagctgctgagtcggcttggacagccagcccccttgtggcttcaggaagaattgcagcattccagtgtgggctgataccccagtccttccttccataccagcaaaaggcctgctaacttcgccgagggacaagccttagagcacagcccacagggggattaatgtggcctggccccttacccctctacctcagtggcccctcaggattggaatggccgaaaggggagggcatccatctctttcccatagttttggggcctaataaaggggctttccttggtacccccctatggtactaggtactaggtacctctgacctatgaacctgggaggtgaggaagagagggtccagggaaggggtagaagaatgtattcaatggttccctcctcatccccagcagtttacctgtcaatgcctacccatgagagggccctttgctgtggcccctttattcaagacagtgggatctacctgtggcctggcctccctagtgtcattcacattgaatggggatgaggtcagacagttgctcatagagccatatatgagcccgagctgtgggctggaaatgtccttaataaacatccttatttttctgcttggtctgcttcgtcgcagaggaaaacaaaccaaccaaccctagactacagcaggtatcagctgtccttccacagctcttctccacaaggaagaaagcagagacccacgagacagagtaaaaaaggagtttat

SEQ ID NO: 38 - DNA, 3897 bp, Rattus norvegicus
  misc_feature 1..3897: note = Reverse Complement of SEQ ID NO:37
  source 1..3897: mol_type = genomic DNA
ataaactccttttttactctgtctcgtgggtctctgctttcttccttgtggagaagagctgtggaaggacagctgatacctgctgtagtctagggttggttggtttgttttcctctgcgacgaagcagaccaagcagaaaaataaggatgtttattaaggacatttccagcccacagctcgggctcatatatggctctatgagcaactgtctgacctcatccccattcaatgtgaatgacactagggaggccaggccacaggtagatcccactgtcttgaataaaggggccacagcaaagggccctctcatgggtaggcattgacaggtaaactgctggggatgaggagggaaccattgaatacattcttctaccccttccctggaccctctcttcctcacctcccaggttcataggtcagaggtacctagtacctagtaccataggggggtaccaaggaaagcccctttattaggccccaaaactatgggaaagagatggatgccctcccctttcggccattccaatcctgaggggccactgaggtagaggggtaaggggccaggccacattaatccccctgtgggctgtgctctaaggcttgtccctcggcgaagttagcaggccttttgctggtatggaaggaaggactggggtatcagcccacactggaatgctgcaattcttcctgaagccacaagggggctggctgtccaagccgactcagcagctttgatagctccaaattatgggttcggaaaaaatccgtaaggaaaaggcgagactccatgtccatgtctgggtacctccggcctttgcttctccctagacagcgagtcttcccgccttcaaggccctggcaccaaaatcctttatctgcatcgaacctgagggtcctcgtgtagttcagaaagggggtgatacccaggaacttctggatgatctccattgaggctgctgggttgacacgaagctcctgcccatccataatcagcaactgtccggaggggtagtaagtcagccagcgctgaaggtgggtagaatagtagccaggaacaagacaacggctctgcaaggagcgaagcagcagaggggcgtgggaggaagctgaaatcacttggtagaaggtgtagttcagagcaacagggtctccatgtgctctctggtgctggtaccaggagtaggccctgtcagcagggttgatgagcacagtgatgatcttggctcttggcaaaagggcagccccccgccgaggtacaacctctgagtcaaagtaggtggcactcttttcaaacaggaagtcagtgctggcattggaaggaacagggaagaagtccatataccagtcgatgcccttgtggtaattggggccattgaagaactgaatttcctcaaaggtgctagggctggggaaactgcttgtcactgcggggtgcaggctcaggaagaagtgaatggctgtggtgcctgtcttctgtggtcccacaatgaggaacttggggagtcggtcacaggttttctccttggaccagatatctttgtgcctcttgtcgtcacagggattctgccaaagggggcttcgttcctgagggaaaagttcaaagtacttctgggcaagaggcacagggggaagggtctgcagccgcagccgtgtccagcactggaggaagcgcaccaggctctcaaaggtgtacaggcccagccggtcgttcccatagttggacagatgggtcataaagacactgatcggattaagcagcactgtcagaaagagttctccacctcgaatgcttcgatccagttcacgagaacctccaggatactcattatagaagatggtgtgagtgaagaggccacatgtttgccgggggagcaccatgatgccattgtgaatgaagcctcggcggtagcgagcagggcgcagatggggatactcctcagtgctggtcacctgaatgccccacacggatttccaggcctcatagagctgcgtgtggatggggtacacaccagagtggtggggggccacagcataccccagatccgtaggaatcccatgctccaaagcaaactgtttgttgagcctcatctggtcggccagcacggagcgattgtggaacaggtgtggctgcatgtgactccacatgtgagggaaccaccagaactctctgcggtgcctcagcagcatatcgtcccccgcgtcctcctcctctgtccccgtatgatagaacttgcccgagaagcccaggttgaaggtgaagttggggactaaggtcctgagtttgttctgggtagtcagcagagcctcaacatcagccaccttcatgcgagtaccttctttgcccacaaagatgtcgtcgatgtctactaagatgtagcggtcaaggtccaggcagagacgcttgccagtgaggtatgcgacagcatcgacaaacacaagtttgtgaagccaaaaagagaggccgtgtccaaacagcacccgctggatgccgtcatgaagccccaagtcctgcaccacagtggggagccgggctcgccgcagagctggtcccggcaaggggagctctgctggccgatggctggcgatgagcactggctcataggtgctgtgattggactggaagatggtccagtcgtccccaggcagtggtcctggctccaagcggctagggcgggtgagatgtagcagaggagcggaagggttcacttggtagtcccgcagccccaagtttgagtataggaaaagggggaagcccttgagttgggcactcaggaggctatgctcgtgggctcggaaaaagccaatgatgcccacaccgtactccacacagtatcggtctagcagttctcgactccaggagtccaagttgacgtactttagaaggttctcatagatgaccaacacgtagcgaccatgggtgtgatcagtcagcgtgggcatatcccctcggccaggtgctaactcagtgctgtaacgaaagcgactagactccaagatggccacaatctcctgccccagttgtgagtacgcactttccacaaacacaaggaccacaggttctgttcgagttgtttctggaggccttgggggtcgaggtgggactggtggccttgcaggaccagggccagctgccccactgctactacagtctcccaagggcagaggcaagggttccttggccttggggctggtggatacaaagtaagccaggaatgccatggagacaagactgaaaccaatcagcagcagtatgaggcggtgcagttccagttgccgagcagggcgtaccaccttccacagctggagcatggcgaggagaagggagggagggacagagggacagggaccacctcaggagatgggaagtatgagctctgtgggctggaactgtcttggcaggggaaggatcctcttagggtcagttccctgatgagatgaacacaaacgctttcagtacaggacaggggaggcagaaagagcaacagggtgtcctggacagaatctactggtctcaggtcaccatggccccctggcccatgcctcaggctgaaacttgattttcctcagccccgatgtagcttcttacatgaggagtcagtgaagtccacacgctcggcccttacaatccgttagtggatgaactgggattcaaaggtcaggcctgtcaaactcctgtgttgtaaccactgcattttagcttcatatccggtggagtgggcggcgtccccgctgtcccggggccccgccgcgtcccggggccgcccggcttccctgctcgcggggcctcgggccgcgtcgcggcggctccgccatctccgagcgaacgctccgccgcagtcgggcccaagtactgctcccaccagggggaggcggcgcgctgcggctcggggtgcccg

SEQ ID NO: 39 - DNA, 4746 bp, Macaca mulatta
  misc_feature 1..4746: note = >XM_028826457.1 PREDICTED: Macaca mulatta N-deacetylase and N-sulfotransferase 2 (NDST2), transcript variant X1, mRNA
  source 1..4746: mol_type = genomic DNA
gctgaggtgggagggtcacttgagcccaggagtttgaagctgcagtaggctatgatcacaccagcacactgtatcctgggtgacagaacaagactccatctaaaaataataaaagagatccccaaaattagacctccttaaaactgtgtttttctgatcacactgtcctctttccttctgtcattggttggatgtaatttaagctcctgttactctctgtcatccagtccttactcaagttgttctgtttgtgtaactgaactcaatacctcatgtctctccaggctagctcagggactcttctgagctgttgaggaatagggttggagaaccacttaggctaagttaggaaggagaactagagtggactcagttgtctggcttttctcagcacccagtgtgtggcctgctcaggagttacatttttatctcctgactggcaaagttgaggtgaaggtcaggggcagataatgtttcacaagcaacaggtaagggagtccctaagttctgggtttggaaactggtagaatgattacctatcatgaggattgctctttccttttgaactcccccaccatagtgtccacctgactgcaagttcgttaatgctgttggctgtgatattgggtttgattgatgaggacgattaacagactcatgagttccttatctgatatttcgttggagcatgggacttttgaggacttccggggctttccgtcccttcctcacagaaagatcagagctgttgctggctggccagctactcagtcatgggctaggaactcctttcagagcagggctgtttttagcctcctaggatatttagcctcttgttgatgggagatttgttcccctctatcatttgcatatactgctccatctctgagctttgcttagagtgaagaatttggacattcatttgggtattctaagaaagggaaagggaacaagctgtgaagccaaggtaaaggacttagcttgtagattctcctacaggaggctttttttctttttttttttttgagaacagattatccaataagcaggaggtaagagagatgggatggggaggaaaatggattaatgacacagtttcagaaggaggaataacccactgatttctctgtcttacaggtaggggggcagagattgaactttgctgacctttgatgtgaggcactcagccagggccaaggggagagcctggcaagatttgcagcctgaagccatgggccagggggccatggtgacctgagactagtggactctgtatagttgccccctgcttccccttctgcctcccctaccctatactaaggggactcatctccacctcttaaggaaactccccctgagggaatccctgtcccatattttcctatccttctacccttccaagacagtcctagcctatagaactcctacctcccatcccctgaggtggtccccattcctccctcccttcctccccccgccatgctccagttgtggaaggtggtacgcccagctcggcagctggaactgcaccgcctcatactgctgctgattgctttcagcctgggctccatgggcttcctggcttactatgtgtccaccagccctaaggccaaggagcccctgcccctgcccttgggagactgcagcagcagtggggcagctggtcctggccctgcacggcctccagttccacctcggccccccaggcctccagagacagttcgaactgaacctgtggtccttgtgtttgtggagagtgcatactcacagctggggcaggaaattgtggccatcctggaatctagtcgttttcgttatagcactgagttggcacctggccgaggtgacatgcccacattgactgataatacccatggccgctatgtcttggtcatttatgagaacctgctcaagtatgtcaacttggatgcctggagtcgagaactgctagaccggtactgtgtggagtatggtgtgggcatcattggctttttccgagcccacgagcacagcctactgagtgcccagcttaagggctttcccctttttttacactcaaacttggggctccgggactaccaagtgaatccttctgccccgctactgcatctcacacgccccagccgcctagaaccagggccactccctggtgatgactggaccatcttccaatccaatcatagtacatatgaaccagtgcttcttgccagccttcggccagctgagcccctggtgccaggaccagttcttcgtcgggcccggcttcccactgtggtacaggacctggggcttcatgatggcatccagcgggtgctctttggtcacggcctttccttctggctccacaaacttatcttcgttgatgctgttgcatacctcactggcaagcgcctctgcctggacctcgaccgctacatcttggtagacatcgatgacatctttgtgggcaaggaagggacccgcatgaaggtggctgatgttgaggctctgttgatcacccagaacaaactcaggaccttagtccccaacttcaccttcaacttgggcttctcgggcaagttctatcatactgggacagaggaggaggatgcaggggacgacatgctgctgaagcaccgcaaagagttctggtggttcccgcacatgtggagtcacatgcaaccacacctgttccacaatcgctccgtgctggctgaccagatgaggctcaacaaacagtttgctctggagcatgggattcccacggatctggggtatgctgtggccccccaccactcgggcgtgtaccccatccacacgcagctctatgaggcctggaaatccgtgtggggcatccaggtgaccagcactgaggagtatccccatctccgccctgcccgctaccgtcgtggcttcattcacaatggcattatggtgctgccccggcagacatgtggcctcttcactcacacaatcttctataatgagtatcctggaggctctcgtgaactagaccggagcatccgaggtggagagctctttctgacagtgctgcttaatccgattagcatctttatgacccatctgtccaattatggaaatgatcggctgggcctgtacacctttgagagcttggtgcgcttcctccagtgctggacacggctgcgcctacagacccttcctcctgtcccgcttgcacagaagtactttgaacttttccctcaggagcgaagccccctttggcagaatccctgtgatgacaagaggcacaaagatatctggtccaaggagaaaacctgtgatcgtctcccgaagttcctcattgtgggaccccagaaaacagggactacagctattcacttcttcctgagcctgcacccagctgtaactagcagcttccctagccccagcacatttgaggagattcagttcttcaacggccctaattaccacaagggtattgactggtacatggatttcttccctgttccttccaatgccagcactgatttcctatttgaaaaaagtgccacctactttgattcagaggttgtaccacggcggggggctgccctcctgccacgagccaagatcatcacagtgctcaccaaccctgctgacagggcctactcctggtaccagcatcagcgagcccatggagacccagttgctctgaactataccttctatcaggtgatttcagcctcctcccagacccctctggcactacgctccctgcagaaccgctgtcttgtccctggctactattctacccatctacaacgctggctgacttactacccctctggacagttgctgattgtggatgggcaagagctgcgtaccaacccagcagcctcaatggagagcatccagaagttcctgggtatcacaccctttctgaactacacacggaccctcaggtttgatgacgataagggattttggtgccagggacttgaaggtggtaagactcgctgcctaggacggagcaaaggtcggaggtatccagatatggatactgaggtaagtaaagccaggggctggggaatccctctccacttccaggatctgattctgtgtcccactagtgtcccacttcttaccatttctgcctccattttctcctgtcagtcccgtcttttccttacggattttttccggaaccataatttggagttgtcgaagctgctgagccggcttggacagccagtgccctcatggcttcgggaagaactgcagcattccagtctgggctgatgtcccagcctcccgtaccagcaaaatgccctctgcttccctaaggggcaagcccagagcagggcccacaagggggattagagtggcctggcccctccccctctacctcagtagccccctgagaagggaagggtatccttttcccatagttctggggcgaataaagggacttcctctggtaccccacatcatggtactaggtacctttgacccatcatcttgggaggtggggaggaatgagagggttcaggcagggtataggggaatgtattagtccaatgagatttcccttttcatccacagcagtgtatctatctatacctggctatgggagggaccccttgctatggcccctttagtcaggcagtgggatctacctgtggcccggcctccctaatgtcattcacattgaatggggatgaggtcggacagtggctcatagagctgagtatgagccctagctgtgggctagaaatgtccttaataaacatccttatttttctgttt

SEQ ID NO: 40 - DNA, 4746 bp, Macaca mulatta
  misc_feature 1..4746: note = Reverse Complement of SEQ ID NO:39
  source 1..4746: mol_type = genomic DNA
aaacagaaaaataaggatgtttattaaggacatttctagcccacagctagggctcatactcagctctatgagccactgtccgacctcatccccattcaatgtgaatgacattagggaggccgggccacaggtagatcccactgcctgactaaaggggccatagcaaggggtccctcccatagccaggtatagatagatacactgctgtggatgaaaagggaaatctcattggactaatacattcccctataccctgcctgaaccctctcattcctccccacctcccaagatgatgggtcaaaggtacctagtaccatgatgtggggtaccagaggaagtccctttattcgccccagaactatgggaaaaggatacccttcccttctcagggggctactgaggtagagggggaggggccaggccactctaatcccccttgtgggccctgctctgggcttgccccttagggaagcagagggcattttgctggtacgggaggctgggacatcagcccagactggaatgctgcagttcttcccgaagccatgagggcactggctgtccaagccggctcagcagcttcgacaactccaaattatggttccggaaaaaatccgtaaggaaaagacgggactgacaggagaaaatggaggcagaaatggtaagaagtgggacactagtgggacacagaatcagatcctggaagtggagagggattccccagcccctggctttacttacctcagtatccatatctggatacctccgacctttgctccgtcctaggcagcgagtcttaccaccttcaagtccctggcaccaaaatcccttatcgtcatcaaacctgagggtccgtgtgtagttcagaaagggtgtgatacccaggaacttctggatgctctccattgaggctgctgggttggtacgcagctcttgcccatccacaatcagcaactgtccagaggggtagtaagtcagccagcgttgtagatgggtagaatagtagccagggacaagacagcggttctgcagggagcgtagtgccagaggggtctgggaggaggctgaaatcacctgatagaaggtatagttcagagcaactgggtctccatgggctcgctgatgctggtaccaggagtaggccctgtcagcagggttggtgagcactgtgatgatcttggctcgtggcaggagggcagccccccgccgtggtacaacctctgaatcaaagtaggtggcacttttttcaaataggaaatcagtgctggcattggaaggaacagggaagaaatccatgtaccagtcaatacccttgtggtaattagggccgttgaagaactgaatctcctcaaatgtgctggggctagggaagctgctagttacagctgggtgcaggctcaggaagaagtgaatagctgtagtccctgttttctggggtcccacaatgaggaacttcgggagacgatcacaggttttctccttggaccagatatctttgtgcctcttgtcatcacagggattctgccaaagggggcttcgctcctgagggaaaagttcaaagtacttctgtgcaagcgggacaggaggaagggtctgtaggcgcagccgtgtccagcactggaggaagcgcaccaagctctcaaaggtgtacaggcccagccgatcatttccataattggacagatgggtcataaagatgctaatcggattaagcagcactgtcagaaagagctctccacctcggatgctccggtctagttcacgagagcctccaggatactcattatagaagattgtgtgagtgaagaggccacatgtctgccggggcagcaccataatgccattgtgaatgaagccacgacggtagcgggcagggcggagatggggatactcctcagtgctggtcacctggatgccccacacggatttccaggcctcatagagctgcgtgtggatggggtacacgcccgagtggtggggggccacagcataccccagatccgtgggaatcccatgctccagagcaaactgtttgttgagcctcatctggtcagccagcacggagcgattgtggaacaggtgtggttgcatgtgactccacatgtgcgggaaccaccagaactctttgcggtgcttcagcagcatgtcgtcccctgcatcctcctcctctgtcccagtatgatagaacttgcccgagaagcccaagttgaaggtgaagttggggactaaggtcctgagtttgttctgggtgatcaacagagcctcaacatcagccaccttcatgcgggtcccttccttgcccacaaagatgtcatcgatgtctaccaagatgtagcggtcgaggtccaggcagaggcgcttgccagtgaggtatgcaacagcatcaacgaagataagtttgtggagccagaaggaaaggccgtgaccaaagagcacccgctggatgccatcatgaagccccaggtcctgtaccacagtgggaagccgggcccgacgaagaactggtcctggcaccaggggctcagctggccgaaggctggcaagaagcactggttcatatgtactatgattggattggaagatggtccagtcatcaccagggagtggccctggttctaggcggctggggcgtgtgagatgcagtagcggggcagaaggattcacttggtagtcccggagccccaagtttgagtgtaaaaaaaggggaaagcccttaagctgggcactcagtaggctgtgctcgtgggctcggaaaaagccaatgatgcccacaccatactccacacagtaccggtctagcagttctcgactccaggcatccaagttgacatacttgagcaggttctcataaatgaccaagacatagcggccatgggtattatcagtcaatgtgggcatgtcacctcggccaggtgccaactcagtgctataacgaaaacgactagattccaggatggccacaatttcctgccccagctgtgagtatgcactctccacaaacacaaggaccacaggttcagttcgaactgtctctggaggcctggggggccgaggtggaactggaggccgtgcagggccaggaccagctgccccactgctgctgcagtctcccaagggcaggggcaggggctccttggccttagggctggtggacacatagtaagccaggaagcccatggagcccaggctgaaagcaatcagcagcagtatgaggcggtgcagttccagctgccgagctgggcgtaccaccttccacaactggagcatggcggggggaggaagggagggaggaatggggaccacctcaggggatgggaggtaggagttctataggctaggactgtcttggaagggtagaaggataggaaaatatgggacagggattccctcagggggagtttccttaagaggtggagatgagtccccttagtatagggtaggggaggcagaaggggaagcagggggcaactatacagagtccactagtctcaggtcaccatggccccctggcccatggcttcaggctgcaaatcttgccaggctctccccttggccctggctgagtgcctcacatcaaaggtcagcaaagttcaatctctgcccccctacctgtaagacagagaaatcagtgggttattcctccttctgaaactgtgtcattaatccattttcctccccatcccatctctcttacctcctgcttattggataatctgttctcaaaaaaaaaaaaagaaaaaaagcctcctgtaggagaatctacaagctaagtcctttaccttggcttcacagcttgttccctttccctttcttagaatacccaaatgaatgtccaaattcttcactctaagcaaagctcagagatggagcagtatatgcaaatgatagaggggaacaaatctcccatcaacaagaggctaaatatcctaggaggctaaaaacagccctgctctgaaaggagttcctagcccatgactgagtagctggccagccagcaacagctctgatctttctgtgaggaagggacggaaagccccggaagtcctcaaaagtcccatgctccaacgaaatatcagataaggaactcatgagtctgttaatcgtcctcatcaatcaaacccaatatcacagccaacagcattaacgaacttgcagtcaggtggacactatggtgggggagttcaaaaggaaagagcaatcctcatgataggtaatcattctaccagtttccaaacccagaacttagggactcccttacctgttgcttgtgaaacattatctgcccctgaccttcacctcaactttgccagtcaggagataaaaatgtaactcctgagcaggccacacactgggtgctgagaaaagccagacaactgagtccactctagttctccttcctaacttagcctaagtggttctccaaccctattcctcaacagctcagaagagtccctgagctagcctggagagacatgaggtattgagttcagttacacaaacagaacaacttgagtaaggactggatgacagagagtaacaggagcttaaattacatccaaccaatgacagaaggaaagaggacagtgtgatcagaaaaacacagttttaaggaggtctaattttggggatctcttttattatttttagatggagtcttgttctgtcacccaggatacagtgtgctggtgtgatcatagcctactgcagcttcaaactcctgggctcaagtgaccctcccacctcagc

SEQ ID NO: 41 - RNA, 21 nt, synthetic construct
  source 1..21: mol_type = other RNA
ttgtgtttatttacaatccta

SEQ ID NO: 42 - RNA, 21 nt, synthetic construct
  source 1..21: mol_type = other RNA
tttatttacaatcctcttgaa

SEQ ID NO: 43 - RNA, 21 nt, synthetic construct
  source 1..21: mol_type = other RNA
tttctttccttgggatcaata

SEQ ID NO: 44 - RNA, 21 nt, synthetic construct
  source 1..21: mol_type = other RNA
ttgggatcaattggaaaacga

SEQ ID NO: 45 - RNA, 21 nt, synthetic construct
  source 1..21: mol_type = other RNA
ctcgagcatctacaaaggcaa

SEQ ID NO: 46 - RNA, 21 nt, synthetic construct
  source 1..21: mol_type = other RNA
gagtcctgcttcgatttcaca

SEQ ID NO: 47 - RNA, 21 nt, synthetic construct
  source 1..21: mol_type = other RNA
agtcctgcttcgatttcacca

SEQ ID NO: 48 - RNA, 21 nt, synthetic construct
  source 1..21: mol_type = other RNA
caccctttgcaagaaaaacga

SEQ ID NO: 49 - RNA, 21 nt, synthetic construct
  source 1..21: mol_type = other RNA
ccctttgcaagaaaaacggca

SEQ ID NO: 50 - RNA, 21 nt, synthetic construct
  source 1..21: mol_type = other RNA
aaaaacggcttcaaagtctaa

SEQ ID NO: 51 - RNA, 21 nt, synthetic construct
  source 1..21: mol_type = other RNA
aacggcttcaaagtctacgta

SEQ ID NO: 52 - RNA, 21 nt, synthetic construct
  source 1..21: mol_type = other RNA
ttaccaaaacattctagcgga

SEQ ID NO: 53 - RNA, 21 nt, synthetic construct
  source 1..21: mol_type = other RNA
ctttgtcttgagtctggataa

SEQ ID NO: 54 - RNA, 21 nt, synthetic construct
  source 1..21: mol_type = other RNA
cttgagtctggatactttaga

SEQ ID NO: 55 - RNA, 21 nt, synthetic construct
  source 1..21: mol_type = other RNA
gtctggatactttagacagaa

SEQ ID NO: 56 - RNA, 21 nt, synthetic construct
  source 1..21: mol_type = other RNA
gtgcacaatttgagatccaaa

SEQ ID NO: 57 - RNA, 21 nt, synthetic construct
  source 1..21: mol_type = other RNA
gtggaacaatggtaggaatca

SEQ ID NO: 58 - RNA, 21 nt, synthetic construct
  source 1..21: mol_type = other RNA
gaacaatggtaggaatcatta

SEQ ID NO: 59 - RNA, 21 nt, synthetic construct
  source 1..21: mol_type = other RNA
atcagtactgaaaacttccga

SEQ ID NO: 60 - RNA, 21 nt, synthetic construct
  source 1..21: mol_type = other RNA
tcagtactgaaaacttccgaa

SEQ ID NO: 61 - RNA, 21 nt, synthetic construct
  source 1..21: mol_type = other RNA
cagtactgaaaacttccgaca

SEQ ID NO: 62 - RNA, 21 nt, synthetic construct
  source 1..21: mol_type = other RNA
actgaaaacttccgaccaaaa

SEQ ID NO: 63 - RNA, 21 nt, synthetic construct
  source 1..21: mol_type = other RNA
acttccgaccaaactttgata

SEQ ID NO: 64 - RNA, 21 nt, synthetic construct
  source 1..21: mol_type = other RNA
cgaccaaactttgatgtttca

SEQ ID NO: 65 - RNA, 21 nt, synthetic construct
  source 1..21: mol_type = other RNA
tcttttctaaggatcatccca

SEQ ID NO: 66 - RNA, 21 nt, synthetic construct
  source 1..21: mol_type = other RNA
cttttctaaggatcatcccaa

SEQ ID NO: 67 - RNA, 21 nt, synthetic construct
  source 1..21: mol_type = other RNA
aggaatgccttatatcacgta

SEQ ID NO: 68 - RNA, 21 nt, synthetic construct
  source 1..21: mol_type = other RNA
ggaatgccttatatcacgtca

SEQ ID NO: 69 - RNA, 21 nt, synthetic construct
  source 1..21: mol_type = other RNA
aatgccttatatcacgtccaa

SEQ ID NO: 70 - RNA, 21 nt, synthetic construct
  source 1..21: mol_type = other RNA
atgccttatatcacgtccata

SEQ ID NO: 71 - RNA, 21 nt, synthetic construct
  source 1..21: mol_type = other RNA
tgccttatatcacgtccataa

SEQ ID NO: 72 - RNA, 21 nt, synthetic construct
  source 1..21: mol_type = other RNA
gccttatatcacgtccataaa

SEQ ID NO: 73 - RNA, 21 nt, synthetic construct
  source 1..21: mol_type = other RNA
cttatatcacgtccataacga

SEQ ID NO: 74 - RNA, 21 nt, synthetic construct
  source 1..21: mol_type = other RNA
ttatatcacgtccataacgga

SEQ ID NO: 75 - RNA, 21 nt, synthetic construct
  source 1..21: mol_type = other RNA
aaagcacaaggattctcgcta

SEQ ID NO: 76 - RNA, 21 nt, synthetic construct
  source 1..21: mol_type = other RNA
aatatgattatcgggaaatga

SEQ ID NO: 77 - RNA, 21 nt, synthetic construct
  source 1..21: mol_type = other RNA
atatgattatcgggaaatgca

SEQ ID NO: 78 - RNA, 21 nt, synthetic construct
  source 1..21: mol_type = other RNA
tgagagattgctattacagaa

SEQ ID NO: 79 - RNA, 21 nt, synthetic construct
  source 1..21: mol_type = other RNA
gagagattgctattacagata

SEQ ID NO: 80 - RNA, 21 nt, synthetic construct
  source 1..21: mol_type = other RNA
gctattacagattccttctaa

SEQ ID NO: 81 - RNA, 21 nt, synthetic construct
  source 1..21: mol_type = other RNA
tacagattccttctacaatca

SEQ ID NO: 82 - RNA, 21 nt, synthetic construct
  source 1..21: mol_type = other RNA
gattccttctacaatcaggta

SEQ ID NO: 83 - RNA, 21 nt, synthetic construct
  source 1..21: mol_type = other RNA
cttctacaatcaggtctatta

SEQ ID NO: 84 - RNA, 21 nt, synthetic construct
  source 1..21: mol_type = other RNA
tacaatcaggtctattcatca

SEQ ID NO: 85 - RNA, 21 nt, synthetic construct
  source 1..21: mol_type = other RNA
aggtctattcatcaggataaa

SEQ ID NO: 86 - RNA, 21 nt, synthetic construct
  source 1..21: mol_type = other RNA
ttcttcagttgagaagattga

SEQ ID NO: 87 - RNA, 21 nt, synthetic construct
  source 1..21: mol_type = other RNA
tcttcagttgagaagattgta

SEQ ID NO: 88 - RNA, 21 nt, synthetic construct
  source 1..21: mol_type = other RNA
cagttgagaagattgtattaa

SEQ ID NO: 89 - RNA, 21 nt, synthetic construct
  source 1..21: mol_type = other RNA
gttgagaagattgtattaaca

SEQ ID NO: 90 - RNA, 21 nt, synthetic construct
  source 1..21: mol_type = other RNA
aagattgtattaactacacta

SEQ ID NO: 91 - RNA, 21 nt, synthetic construct
  source 1..21: mol_type = other RNA
ttgtattaactacactagaga

SEQ ID NO: 92 - RNA, 21 nt, synthetic construct
  source 1..21: mol_type = other RNA
gtattaactacactagagata

SEQ ID NO: 93 - RNA, 21 nt, synthetic construct
  source 1..21: mol_type = other RNA
tattaactacactagagatta

SEQ ID NO: 94 - RNA, 21 nt, synthetic construct
  source 1..21: mol_type = other RNA
atattcaagcacatatcacga

SEQ ID NO: 95 - RNA, 21 nt, synthetic construct
  source 1..21: mol_type = other RNA
attcaagcacatatcacgtaa

SEQ ID NO: 96 - RNA, 21 nt, synthetic construct
  source 1..21: mol_type = other RNA
ttcaagcacatatcacgtaaa

SEQ ID NO: 97 - RNA, 21 nt, synthetic construct
  source 1..21: mol_type = other RNA
tcaagcacatatcacgtaaca

SEQ ID NO: 98 - RNA, 21 nt, synthetic construct
  source 1..21: mol_type = other RNA
agcacatatcacgtaacagta

SEQ ID NO: 99 - RNA, 21 nt, synthetic construct
  source 1..21: mol_type = other RNA
cagtttaatatggaacaaaca

SEQ ID NO: 100 - RNA, 21 nt, synthetic construct
  source 1..21: mol_type = other RNA
catcctggaggattgttcgta

SEQ ID NO: 101 - RNA, 21 nt, synthetic construct
  source 1..21: mol_type = other RNA
atttcccttactactatgcta

SEQ ID NO: 102 - RNA, 21 nt, synthetic construct
  source 1..21: mol_type = other RNA
tttcccttactactatgctaa

SEQ ID NO: 103 - RNA, 21 nt, synthetic construct
  source 1..21: mol_type = other RNA
ttcccttactactatgctaaa

SEQ ID NO: 104 - RNA, 21 nt, synthetic construct
  source 1..21: mol_type = other RNA
tcccttactactatgctaata

SEQ ID NO: 105 - RNA, 21 nt, synthetic construct
  source 1..21: mol_type = other RNA
cccttactactatgctaatta

SEQ ID NO: 106 - RNA, 21 nt, synthetic construct
  source 1..21: mol_type = other RNA
tactactatgctaatttagga

SEQ ID NO: 107 - RNA, 21 nt, synthetic construct
  source 1..21: mol_type = other RNA
gttctgtggaattgtgacaaa

SEQ ID NO: 108 - RNA, 21 nt, synthetic construct
  source 1..21: mol_type = other RNA
tttcaactacggaagtggata

SEQ ID NO: 109 - RNA, 21 nt, synthetic construct
  source 1..21: mol_type = other RNA
catttctgggataactcaaaa

SEQ ID NO: 110 - RNA, 21 nt, synthetic construct
  source 1..21: mol_type = other RNA
tttctgggataactcaaagga

SEQ ID NO: 111 - RNA, 21 nt, synthetic construct
  source 1..21: mol_type = other RNA
ctgctatctaccacaaatata

SEQ ID NO: 112 - RNA, 21 nt, synthetic construct
  source 1..21: mol_type = other RNA
tgctatctaccacaaatatta

SEQ ID NO: 113 - RNA, 21 nt, synthetic construct
  source 1..21: mol_type = other RNA
ctaccacaaatattatcacta

SEQ ID NO: 114 - RNA, 21 nt, synthetic construct
  source 1..21: mol_type = other RNA
taccacaaatattatcactaa

SEQ ID NO: 115 - RNA, 21 nt, synthetic construct
  source 1..21: mol_type = other RNA
accacaaatattatcactaca

SEQ ID NO: 116 - RNA, 21 nt, synthetic construct
  source 1..21: mol_type = other RNA
cacaaatattatcactaccta

SEQ ID NO: 117 - RNA, 21 nt, synthetic construct
  source 1..21: mol_type = other RNA
tatcactacctgtattcccaa

SEQ ID NO: 118 - RNA, 21 nt, synthetic construct
  source 1..21: mol_type = other RNA
atcactacctgtattcccata

SEQ ID NO: 119 - RNA, 21 nt, synthetic construct
  source 1..21: mol_type = other RNA
cactacctgtattcccattaa

SEQ ID NO: 120 - RNA, 21 nt, synthetic construct
  source 1..21: mol_type = other RNA
tgaggacattctcatgaatta

SEQ ID NO: 121 - RNA, 21 nt, synthetic construct
  source 1..21: mol_type = other RNA
gaggacattctcatgaattta

SEQ ID NO: 122 - RNA, 21 nt, synthetic construct
  source 1..21: mol_type = other RNA
aggacattctcatgaatttca

SEQ ID NO: 123 - RNA, 21 nt, synthetic construct
  source 1..21: mol_type = other RNA
ggacattctcatgaatttcca

SEQ ID NO: 124 - RNA, 21 nt, synthetic construct
  source 1..21: mol_type = other RNA
gtgacaaaattgcctccaata

SEQ ID NO: 125 - RNA, 21 nt, synthetic construct
  source 1..21: mol_type = other RNA
ctttaaagaccaagtctcaaa

SEQ ID NO: 126 - RNA, 21 nt, synthetic construct
  source 1..21: mol_type = other RNA
cagagacattgaacgacttta

SEQ ID NO: 127 - RNA, 21 nt, synthetic construct
  source 1..21: mol_type = other RNA
agagacattgaacgactttga

SEQ ID NO: 128 - RNA, 21 nt, synthetic construct
  source 1..21: mol_type = other RNA
tgaacacagtgacaaaactca

SEQ ID NO: 129 - RNA, 21 nt, synthetic construct
  source 1..21: mol_type = other RNA
gaacacagtgacaaaactcga

SEQ ID NO: 130 - RNA, 21 nt, synthetic construct
  source 1..21: mol_type = other RNA
caactaggttgtgtacagtta

SEQ ID NO: 131 - RNA, 21 nt, synthetic construct
  source 1..21: mol_type = other RNA
gtgtacagtttaattatggaa

SEQ ID NO: 132 - RNA, 23 nt, synthetic construct
  source 1..23: mol_type = other RNA
taggattgtaaataaacacaaga

SEQ ID NO: 133 - RNA, 23 nt, synthetic construct
  source 1..23: mol_type = other RNA
ttcaagaggattgtaaataaaca

SEQ ID NO: 134 - RNA, 23 nt, synthetic construct
  source 1..23: mol_type = other RNA
tattgatcccaaggaaagaaagg

SEQ ID NO: 135 - RNA, 23 nt, synthetic construct
  source 1..23: mol_type = other RNA
tcgttttccaattgatcccaagg

SEQ ID NO: 136 - RNA, 23 nt, synthetic construct
  source 1..23: mol_type = other RNA
ttgcctttgtagatgctcgagtt

SEQ ID NO: 137 - RNA, 23 nt, synthetic construct
  source 1..23: mol_type = other RNA
tgtgaaatcgaagcaggactcca

SEQ ID NO: 138 - RNA, 23 nt, synthetic construct
  source 1..23: mol_type = other RNA
tggtgaaatcgaagcaggactcc

SEQ ID NO: 139 - RNA, 23 nt, synthetic construct
  source 1..23: mol_type = other RNA
tcgtttttcttgcaaagggtgaa

SEQ ID NO: 140 - RNA, 23 nt, synthetic construct
  source 1..23: mol_type = other RNA
tgccgtttttcttgcaaagggtg

SEQ ID NO: 141 - RNA, 23 nt, synthetic construct
  source 1..23: mol_type = other RNA
ttagactttgaagccgtttttct

SEQ ID NO: 142 - RNA, 23 nt, synthetic construct
  source 1..23: mol_type = other RNA
tacgtagactttgaagccgtttt

SEQ ID NO: 143 - RNA, 23 nt, synthetic construct
  source 1..23: mol_type = other RNA
tccgctagaatgttttggtaact

SEQ ID NO: 144 - RNA, 23 nt, synthetic construct
  source 1..23: mol_type = other RNA
ttatccagactcaagacaaagag

SEQ ID NO: 145 - RNA, 23 nt, synthetic construct
  source 1..23: mol_type = other RNA
tctaaagtatccagactcaagac

SEQ ID NO: 146 - RNA, 23 nt, synthetic construct
  source 1..23: mol_type = other RNA
ttctgtctaaagtatccagactc

SEQ ID NO: 147 - RNA, 23 nt, synthetic construct
  source 1..23: mol_type = other RNA
tttggatctcaaattgtgcacat

SEQ ID NO: 148 - RNA, 23 nt, synthetic construct
  source 1..23: mol_type = other RNA
tgattcctaccattgttccacaa

SEQ ID NO: 149 - RNA, 23 nt, synthetic construct
  source 1..23: mol_type = other RNA
taatgattcctaccattgttcca

SEQ ID NO: 150 - RNA, 23 nt, synthetic construct
  source 1..23: mol_type = other RNA
tcggaagttttcagtactgatgc

SEQ ID NO: 151 - RNA, 23 nt, synthetic construct
  source 1..23: mol_type = other RNA
ttcggaagttttcagtactgatg

SEQ ID NO: 152 - RNA, 23 nt, synthetic construct
  source 1..23: mol_type = other RNA
tgtcggaagttttcagtactgat

SEQ ID NO: 153 - RNA, 23 nt, synthetic construct
  source 1..23: mol_type = other RNA
ttttggtcggaagttttcagtac

SEQ ID NO: 154 - RNA, 23 nt, synthetic construct
  source 1..23: mol_type = other RNA
tatcaaagtttggtcggaagttt

SEQ ID NO: 155 - RNA, 23 nt, synthetic construct
  source 1..23: mol_type = other RNA
tgaaacatcaaagtttggtcgga

SEQ ID NO: 156 - RNA, 23 nt, synthetic construct
  source 1..23: mol_type = other RNA
tgggatgatccttagaaaagagg

SEQ ID NO: 157 - RNA, 23 nt, synthetic construct
  source 1..23: mol_type = other RNA
ttgggatgatccttagaaaagag

SEQ ID NO: 158 - RNA, 23 nt, synthetic construct
  source 1..23: mol_type = other RNA
tacgtgatataaggcattcctgg

SEQ ID NO: 159 - RNA, 23 nt, synthetic construct
  source 1..23: mol_type = other RNA
tgacgtgatataaggcattcctg

SEQ ID NO: 160 - RNA, 23 nt, synthetic construct
  source 1..23: mol_type = other RNA
ttggacgtgatataaggcattcc

SEQ ID NO: 161 - RNA, 23 nt, synthetic construct
  source 1..23: mol_type = other RNA
tatggacgtgatataaggcattc

SEQ ID NO: 162 - RNA, 23 nt, synthetic construct
  source 1..23: mol_type = other RNA
ttatggacgtgatataaggcatt

SEQ ID NO: 163 - RNA, 23 nt, synthetic construct
  source 1..23: mol_type = other RNA
tttatggacgtgatataaggcat

SEQ ID NO: 164 - RNA, 23 nt, synthetic construct
  source 1..23: mol_type = other RNA
tcgttatggacgtgatataaggc

SEQ ID NO: 165 - RNA, 23 nt, synthetic construct
  source 1..23: mol_type = other RNA
tccgttatggacgtgatataagg

SEQ ID NO: 166 - RNA, 23 nt, synthetic construct
  source 1..23: mol_type = other RNA
tagcgagaatccttgtgcttttg

SEQ ID NO: 167 - RNA, 23 nt, synthetic construct
  source 1..23: mol_type = other RNA
tcatttcccgataatcatatttc

SEQ ID NO: 168 - RNA, 23 nt, synthetic construct
  source 1..23: mol_type = other RNA
tgcatttcccgataatcatattt

SEQ ID NO: 169 - RNA, 23 nt, synthetic construct
  source 1..23: mol_type = other RNA
ttctgtaatagcaatctctcatc

SEQ ID NO: 170 - RNA, 23 nt, synthetic construct
  source 1..23: mol_type = other RNA
tatctgtaatagcaatctctcat

SEQ ID NO: 171 - RNA, 23 nt, synthetic construct
  source 1..23: mol_type = other RNA
ttagaaggaatctgtaatagcaa

SEQ ID NO: 172 - RNA, 23 nt, synthetic construct
  source 1..23: mol_type = other RNA
tgattgtagaaggaatctgtaat

SEQ ID NO: 173 - RNA, 23 nt, synthetic construct
  source 1..23: mol_type = other RNA
tacctgattgtagaaggaatctg

SEQ ID NO: 174 - RNA, 23 nt, synthetic construct
  source 1..23: mol_type = other RNA
taatagacctgattgtagaagga

SEQ ID NO: 175 - RNA, 23 nt, synthetic construct
  source 1..23: mol_type = other RNA
tgatgaatagacctgattgtaga

SEQ ID NO: 176 - RNA, 23 nt, synthetic construct
  source 1..23: mol_type = other RNA
tttatcctgatgaatagacctga

SEQ ID NO: 177 - RNA, 23 nt, synthetic construct
  source 1..23: mol_type = other RNA
tcaatcttctcaactgaagaaaa

SEQ ID NO: 178 - RNA, 23 nt, synthetic construct
  source 1..23: mol_type = other RNA
tacaatcttctcaactgaagaaa

SEQ ID NO: 179 - RNA, 23 nt, synthetic construct
  source 1..23: mol_type = other RNA
ttaatacaatcttctcaactgaa

SEQ ID NO: 180 - RNA, 23 nt, synthetic construct
  source 1..23: mol_type = other RNA
tgttaatacaatcttctcaactg

SEQ ID NO: 181 - RNA, 23 nt, synthetic construct
  source 1..23: mol_type = other RNA
tagtgtagttaatacaatcttct

SEQ ID NO: 182 - RNA, 23 nt, synthetic construct
  source 1..23: mol_type = other RNA
tctctagtgtagttaatacaatc

SEQ ID NO: 183 - RNA, 23 nt, synthetic construct
  source 1..23: mol_type = other RNA
tatctctagtgtagttaatacaa

SEQ ID NO: 184 - RNA, 23 nt, synthetic construct
  source 1..23: mol_type = other RNA
taatctctagtgtagttaataca

SEQ ID NO: 185 - RNA, 23 nt, synthetic construct
  source 1..23: mol_type = other RNA
tcgtgatatgtgcttgaatattc

SEQ ID NO: 186 - RNA, 23 nt, synthetic construct
  source 1..23: mol_type = other RNA
ttacgtgatatgtgcttgaatat

SEQ ID NO: 187 - RNA, 23 nt, synthetic construct
  source 1..23: mol_type = other RNA
tttacgtgatatgtgcttgaata

SEQ ID NO: 188 - RNA, 23 nt, synthetic construct
  source 1..23: mol_type = other RNA
tgttacgtgatatgtgcttgaat

SEQ ID NO: 189 - RNA, 23 nt, synthetic construct
  source 1..23: mol_type = other RNA
tactgttacgtgatatgtgcttg

SEQ ID NO: 190 - RNA, 23 nt, synthetic construct
  source 1..23: mol_type = other RNA
tgtttgttccatattaaactgtt

SEQ ID NO: 191 - RNA, 23 nt, synthetic construct
  source 1..23: mol_type = other RNA
tacgaacaatcctccaggatgtt

SEQ ID NO: 192 - RNA, 23 nt, synthetic construct
  source 1..23: mol_type = other RNA
tagcatagtagtaagggaaatct

SEQ ID NO: 193 - RNA, 23 nt, synthetic construct
  source 1..23: mol_type = other RNA
ttagcatagtagtaagggaaatc

SEQ ID NO: 194 - RNA, 23 nt, synthetic construct
  source 1..23: mol_type = other RNA
tttagcatagtagtaagggaaat

SEQ ID NO: 195 - RNA, 23 nt, synthetic construct
  source 1..23: mol_type = other RNA
tattagcatagtagtaagggaaa

SEQ ID NO: 196 - RNA, 23 nt, synthetic construct
  source 1..23: mol_type = other RNA
taattagcatagtagtaagggaa

SEQ ID NO: 197 - RNA, 23 nt, synthetic construct
  source 1..23: mol_type = other RNA
tcctaaattagcatagtagtaag

SEQ ID NO: 198 - RNA, 23 nt, synthetic construct
  source 1..23: mol_type = other RNA
tttgtcacaattccacagaacta

SEQ ID NO: 199 - RNA, 23 nt, synthetic construct
  source 1..23: mol_type = other RNA
tatccacttccgtagttgaaagc

SEQ ID NO: 200 - RNA, 23 nt, synthetic construct
  source 1..23: mol_type = other RNA
ttttgagttatcccagaaatgac

SEQ ID NO: 201 - RNA, 23 nt, synthetic construct
  source 1..23: mol_type = other RNA
tcctttgagttatcccagaaatg

SEQ ID NO: 202 - RNA, 23 nt, synthetic construct
  source 1..23: mol_type = other RNA
tatatttgtggtagatagcagct

SEQ ID NO: 203 - RNA, 23 nt, synthetic construct
  source 1..23: mol_type = other RNA
taatatttgtggtagatagcagc

SEQ ID NO: 204 - RNA, 23 nt, synthetic construct
  source 1..23: mol_type = other RNA
tagtgataatatttgtggtagat

SEQ ID NO: 205 - RNA, 23 nt, synthetic construct
  source 1..23: mol_type = other RNA
ttagtgataatatttgtggtaga

SEQ ID NO: 206 - RNA, 23 nt, synthetic construct
  source 1..23: mol_type = other RNA
tgtagtgataatatttgtggtag

SEQ ID NO: 207 - RNA, 23 nt, synthetic construct
  source 1..23: mol_type = other RNA
taggtagtgataatatttgtggt

SEQ ID NO: 208 - RNA, 23 nt, synthetic construct
  source 1..23: mol_type = other RNA
ttgggaatacaggtagtgataat

SEQ ID NO: 209 - RNA, 23 nt, synthetic construct
  source 1..23: mol_type = other RNA
tatgggaatacaggtagtgataa

SEQ ID NO: 210 - RNA, 23 nt, synthetic construct
  source 1..23: mol_type = other RNA
ttaatgggaatacaggtagtgat

SEQ ID NO: 211 - RNA, 23 nt, synthetic construct
  source 1..23: mol_type = other RNA
taattcatgagaatgtcctcaca

SEQ ID NO: 212 - RNA, 23 nt, synthetic construct
  source 1..23: mol_type = other RNA
taaattcatgagaatgtcctcac

SEQ ID NO: 213 - RNA, 23 nt, synthetic construct
  source 1..23: mol_type = other RNA
tgaaattcatgagaatgtcctca

SEQ ID NO: 214 - RNA, 23 nt, synthetic construct
  source 1..23: mol_type = other RNA
tggaaattcatgagaatgtcctc

SEQ ID NO: 215 - RNA, 23 nt, synthetic construct
  source 1..23: mol_type = other RNA
tattggaggcaattttgtcacag

SEQ ID NO: 216 - RNA, 23 nt, synthetic construct
  source 1..23: mol_type = other RNA
tttgagacttggtctttaaagag

SEQ ID NO: 217 - RNA, 23 nt, synthetic construct
  source 1..23: mol_type = other RNA
taaagtcgttcaatgtctctgta

SEQ ID NO: 218 - RNA, 23 nt, synthetic construct
  source 1..23: mol_type = other RNA
tcaaagtcgttcaatgtctctgt

SEQ ID NO: 219 - RNA, 23 nt, synthetic construct
  source 1..23: mol_type = other RNA
tgagttttgtcactgtgttcatc

SEQ ID NO: 220 - RNA, 23 nt, synthetic construct
  source 1..23: mol_type = other RNA
tcgagttttgtcactgtgttcat

SEQ ID NO: 221 - RNA, 23 nt, synthetic construct
  source 1..23: mol_type = other RNA
taactgtacacaacctagttgtg

SEQ ID NO: 222 - RNA, 23 nt, synthetic construct
  source 1..23: mol_type = other RNA
ttccataattaaactgtacacaa

SEQ ID NO: 223 - RNA, 21 nt, synthetic construct
  source 1..21: mol_type = other RNA
  modified_base 1: mod_base = OTHER; note = 2'-O-methyluridine-3'-phosphorothioate
  modified_base 2: mod_base = OTHER; note = 2'-O-methyluridine-3'-phosphorothioate
  modified_base 3: mod_base = OTHER; note = 2'-O-methylguanosine-3'-phosphate
  modified_base 4: mod_base = OTHER; note = 2'-O-methyluridine-3'-phosphate
  modified_base 5: mod_base = OTHER; note = 2'-O-methylguanosine-3'-phosphate
  modified_base 6: mod_base = OTHER; note = 2'-O-methyluridine-3'-phosphate
  modified_base 7: mod_base = OTHER; note = 2'-deoxy-2'-fluorouridine-3'-phosphate
  modified_base 8: mod_base = OTHER; note = 2'-O-methyluridine-3'-phosphate
  modified_base 9: mod_base = OTHER; note = 2'-deoxy-2'-fluoroadenosine-3'-phosphate
  modified_base 10: mod_base = OTHER; note = 2'-deoxy-2'-fluorouridine-3'-phosphate
  modified_base 11: mod_base = OTHER; note = 2'-deoxy-2'-fluorouridine-3'-phosphate
  modified_base 12: mod_base = OTHER; note = 2'-O-methyluridine-3'-phosphate
  modified_base 13: mod_base = OTHER; note = 2'-O-methyladenosine-3'-phosphate
  modified_base 14: mod_base = OTHER; note = 2'-O-methylcytidine-3'-phosphate
  modified_base 15: mod_base = OTHER; note = 2'-O-methyladenosine-3'-phosphate
  modified_base 16: mod_base = OTHER; note = 2'-O-methyladenosine-3'-phosphate
  modified_base 17: mod_base = OTHER; note = 2'-O-methyluridine-3'-phosphate
  modified_base 18: mod_base = OTHER; note = 2'-O-methylcytidine-3'-phosphate
  modified_base 19: mod_base = OTHER; note = 2'-O-methylcytidine-3'-phosphate
  modified_base 20: mod_base = OTHER; note = 2'-O-methyluridine-3'-phosphate
  modified_base 21: mod_base = OTHER; note = 2'-O-methyladenosine-3'-phosphate ((2S,4R)-1-[29-[[2-(acetylamino)-2-deoxy-beta-D-galactopyra nosyl]oxy]-14,14-bis[[3-[[3-[[5-[[2-(acetylamino)-2-deoxy-b eta-D-galactopyranosyl]oxy]-1-oxopentyl]amino]propyl]amino] -3-oxopropoxy]methyl]-1,12,19,25-tetraoxo-16-oxa-13,20,24-t riazanonacos-1-yl]-4-hydroxy-2-pyrrolidinyl)methyl ester
ttgtgtttatttacaatccta

SEQ ID NO: 224 - RNA, 21 nt, synthetic construct
  source 1..21: mol_type = other RNA
  modified_base 1: mod_base = OTHER; note = 2'-O-methyluridine-3'-phosphorothioate
  modified_base 2: mod_base = OTHER; note = 2'-O-methyluridine-3'-phosphorothioate
  modified_base 3: mod_base = OTHER; note = 2'-O-methyluridine-3'-phosphate
  modified_base 4: mod_base = OTHER; note = 2'-O-methyladenosine-3'-phosphate
  modified_base 5: mod_base = OTHER; note = 2'-O-methyluridine-3'-phosphate
  modified_base 6: mod_base = OTHER; note = 2'-O-methyluridine-3'-phosphate
  modified_base 7: mod_base = OTHER; note = 2'-deoxy-2'-fluorouridine-3'-phosphate
  modified_base 8: mod_base = OTHER; note = 2'-O-methyladenosine-3'-phosphate
  modified_base 9: mod_base = OTHER; note = 2'-deoxy-2'-fluorocytidine-3'-phosphate
  modified_base 10: mod_base = OTHER; note = 2'-deoxy-2'-fluoroadenosine-3'-phosphate
  modified_base 11: mod_base = OTHER; note = 2'-deoxy-2'-fluoroadenosine-3'-phosphate
  modified_base 12: mod_base = OTHER; note = 2'-O-methyluridine-3'-phosphate
  modified_base 13: mod_base = OTHER; note = 2'-O-methylcytidine-3'-phosphate
  modified_base 14: mod_base = OTHER; note = 2'-O-methylcytidine-3'-phosphate
  modified_base 15: mod_base = OTHER; note = 2'-O-methyluridine-3'-phosphate
  modified_base 16: mod_base = OTHER; note = 2'-O-methylcytidine-3'-phosphate
  modified_base 17: mod_base = OTHER; note = 2'-O-methyluridine-3'-phosphate
  modified_base 18: mod_base = OTHER; note = 2'-O-methyluridine-3'-phosphate
  modified_base 19: mod_base = OTHER; note = 2'-O-methylguanosine-3'-phosphate
  modified_base 20: mod_base = OTHER; note = 2'-O-methyladenosine-3'-phosphate
  modified_base 21: mod_base = OTHER; note = 2'-O-methyladenosine-3'-phosphate ((2S,4R)-1-[29-[[2-(acetylamino)-2-deoxy-beta-D-galactopyra nosyl]oxy]-14,14-bis[[3-[[3-[[5-[[2-(acetylamino)-2-deoxy-b eta-D-galactopyranosyl]oxy]-1-oxopentyl]amino]propyl]amino] -3-oxopropoxy]methyl]-1,12,19,25-tetraoxo-16-oxa-13,20,24-t riazanonacos-1-yl]-4-hydroxy-2-pyrrolidinyl)methyl ester
tttatttacaatcctcttgaa

SEQ ID NO: 225 - RNA, 21 nt, synthetic construct
  source 1..21: mol_type = other RNA
  modified_base 1: mod_base = OTHER; note = 2'-O-methyluridine-3'-phosphorothioate
  modified_base 2: mod_base = OTHER; note = 2'-O-methyluridine-3'-phosphorothioate
  modified_base 3: mod_base = OTHER; note = 2'-O-methyluridine-3'-phosphate
  modified_base 4: mod_base = OTHER; note = 2'-O-methylcytidine-3'-phosphate
  modified_base 5: mod_base = OTHER; note = 2'-O-methyluridine-3'-phosphate
  modified_base 6: mod_base = OTHER; note = 2'-O-methyluridine-3'-phosphate
  modified_base 7: mod_base = OTHER; note = 2'-deoxy-2'-fluorouridine-3'-phosphate
  modified_base 8: mod_base = OTHER; note = 2'-O-methylcytidine-3'-phosphate
  modified_base 9: mod_base = OTHER; note = 2'-deoxy-2'-fluorocytidine-3'-phosphate
  modified_base 10: mod_base = OTHER; note = 2'-deoxy-2'-fluorouridine-3'-phosphate
  modified_base 11: mod_base = OTHER; note = 2'-deoxy-2'-fluorouridine-3'-phosphate
  modified_base 12: mod_base = OTHER; note = 2'-O-methylguanosine-3'-phosphate
  modified_base 13: mod_base = OTHER; note = 2'-O-methylguanosine-3'-phosphate
  modified_base 14: mod_base = OTHER; note = 2'-O-methylguanosine-3'-phosphate
  modified_base 15: mod_base = OTHER; note = 2'-O-methyladenosine-3'-phosphate
  modified_base 16: mod_base = OTHER; note = 2'-O-methyluridine-3'-phosphate
  modified_base 17: mod_base = OTHER; note = 2'-O-methylcytidine-3'-phosphate
  modified_base 18: mod_base = OTHER; note = 2'-O-methyladenosine-3'-phosphate
  modified_base 19: mod_base = OTHER; note = 2'-O-methyladenosine-3'-phosphate
  modified_base 20: mod_base = OTHER; note = 2'-O-methyluridine-3'-phosphate
  modified_base 21: mod_base = OTHER; note = 2'-O-methyladenosine-3'-phosphate ((2S,4R)-1-[29-[[2-(acetylamino)-2-deoxy-beta-D-galactopyra nosyl]oxy]-14,14-bis[[3-[[3-[[5-[[2-(acetylamino)-2-deoxy-b eta-D-galactopyranosyl]oxy]-1-oxopentyl]amino]propyl]amino] -3-oxopropoxy]methyl]-1,12,19,25-tetraoxo-16-oxa-13,20,24-t riazanonacos-1-yl]-4-hydroxy-2-pyrrolidinyl)methyl ester
tttctttccttgggatcaata

SEQ ID NO: 226 - RNA, 21 nt, synthetic construct
  source 1..21: mol_type = other RNA
  modified_base 1: mod_base = OTHER; note = 2'-O-methyluridine-3'-phosphorothioate
  modified_base 2: mod_base = OTHER; note = 2'-O-methyluridine-3'-phosphorothioate
  modified_base 3: mod_base = OTHER; note = 2'-O-methylguanosine-3'-phosphate
  modified_base 4: mod_base = OTHER; note = 2'-O-methylguanosine-3'-phosphate
  modified_base 5: mod_base = OTHER; note = 2'-O-methylguanosine-3'-phosphate
  modified_base 6: mod_base = OTHER; note = 2'-O-methyladenosine-3'-phosphate
  modified_base 7: mod_base = OTHER; note = 2'-deoxy-2'-fluorouridine-3'-phosphate
  modified_base 8: mod_base = OTHER; note = 2'-O-methylcytidine-3'-phosphate
  modified_base 9: mod_base = OTHER; note = 2'-deoxy-2'-fluoroadenosine-3'-phosphate
  modified_base 10: mod_base = OTHER; note = 2'-deoxy-2'-fluoroadenosine-3'-phosphate
  modified_base 11: mod_base = OTHER; note = 2'-deoxy-2'-fluorouridine-3'-phosphate
  modified_base 12: mod_base = OTHER; note = 2'-O-methyluridine-3'-phosphate
  modified_base 13: mod_base = OTHER; note = 2'-O-methylguanosine-3'-phosphate
  modified_base 14: mod_base = OTHER; note = 2'-O-methylguanosine-3'-phosphate
  modified_base 15: mod_base = OTHER; note = 2'-O-methyladenosine-3'-phosphate
  modified_base 16: mod_base = OTHER; note = 2'-O-methyladenosine-3'-phosphate
  modified_base 17: mod_base = OTHER; note = 2'-O-methyladenosine-3'-phosphate
  modified_base 18: mod_base = OTHER; note = 2'-O-methyladenosine-3'-phosphate
  modified_base 19: mod_base = OTHER; note = 2'-O-methylcytidine-3'-phosphate
  modified_base 20: mod_base = OTHER; note = 2'-O-methylguanosine-3'-phosphate
  modified_base 21: mod_base = OTHER; note = 2'-O-methyladenosine-3'-phosphate ((2S,4R)-1-[29-[[2-(acetylamino)-2-deoxy-beta-D-galactopyra nosyl]oxy]-14,14-bis[[3-[[3-[[5-[[2-(acetylamino)-2-deoxy-b eta-D-galactopyranosyl]oxy]-1-oxopentyl]amino]propyl]amino] -3-oxopropoxy]methyl]-1,12,19,25-tetraoxo-16-oxa-13,20,24-t riazanonacos-1-yl]-4-hydroxy-2-pyrrolidinyl)methyl ester
ttgggatcaattggaaaacga

SEQ ID NO: 227 - RNA, 21 nt, synthetic construct
  source 1..21: mol_type = other RNA
  modified_base 1: mod_base = OTHER; note = 2'-O-methylcytidine-3'-phosphorothioate
  modified_base 2: mod_base = OTHER; note = 2'-O-methyluridine-3'-phosphorothioate
  modified_base 3: mod_base = OTHER; note = 2'-O-methylcytidine-3'-phosphate
  modified_base 4: mod_base = OTHER; note = 2'-O-methylguanosine-3'-phosphate
  modified_base 5: mod_base = OTHER; note = 2'-O-methyladenosine-3'-phosphate
  modified_base 6: mod_base = OTHER; note = 2'-O-methylguanosine-3'-phosphate
  modified_base 7: mod_base = OTHER; note = 2'-deoxy-2'-fluorocytidine-3'-phosphate
  modified_base 8: mod_base = OTHER; note = 2'-O-methyladenosine-3'-phosphate
  modified_base 9: mod_base = OTHER; note = 2'-deoxy-2'-fluorouridine-3'-phosphate
  modified_base 10: mod_base = OTHER; note = 2'-deoxy-2'-fluorocytidine-3'-phosphate
  modified_base 11: mod_base = OTHER; note = 2'-deoxy-2'-fluorouridine-3'-phosphate
  modified_base 12: mod_base = OTHER; note = 2'-O-methyladenosine-3'-phosphate
  modified_base 13: mod_base = OTHER; note = 2'-O-methylcytidine-3'-phosphate
  modified_base 14: mod_base = OTHER; note = 2'-O-methyladenosine-3'-phosphate
  modified_base 15: mod_base = OTHER; note = 2'-O-methyladenosine-3'-phosphate
  modified_base 16: mod_base = OTHER; note = 2'-O-methyladenosine-3'-phosphate
  modified_base 17: mod_base = OTHER; note = 2'-O-methylguanosine-3'-phosphate
  modified_base 18: mod_base = OTHER; note = 2'-O-methylguanosine-3'-phosphate
  modified_base 19: mod_base = OTHER; note = 2'-O-methylcytidine-3'-phosphate
  modified_base 20: mod_base = OTHER; note = 2'-O-methyladenosine-3'-phosphate
  modified_base 21: mod_base = OTHER; note = 2'-O-methyladenosine-3'-phosphate ((2S,4R)-1-[29-[[2-(acetylamino)-2-deoxy-beta-D-galactopyra nosyl]oxy]-14,14-bis[[3-[[3-[[5-[[2-(acetylamino)-2-deoxy-b eta-D-galactopyranosyl]oxy]-1-oxopentyl]amino]propyl]amino] -3-oxopropoxy]methyl]-1,12,19,25-tetraoxo-16-oxa-13,20,24-t riazanonacos-1-yl]-4-hydroxy-2-pyrrolidinyl)methyl ester
ctcgagcatctacaaaggcaa

SEQ ID NO: 228 - RNA, 21 nt, synthetic construct
  source 1..21: mol_type = other RNA
  modified_base 1: mod_base = OTHER; note = 2'-O-methylguanosine-3'-phosphorothioate
  modified_base 2: mod_base = OTHER; note = 2'-O-methyladenosine-3'-phosphorothioate
  modified_base 3: mod_base = OTHER; note = 2'-O-methylguanosine-3'-phosphate
  modified_base 4: mod_base = OTHER; note = 2'-O-methyluridine-3'-phosphate
  modified_base 5: mod_base = OTHER; note = 2'-O-methylcytidine-3'-phosphate
  modified_base 6: mod_base = OTHER; note = 2'-O-methylcytidine-3'-phosphate
  modified_base 7: mod_base = OTHER; note = 2'-deoxy-2'-fluorouridine-3'-phosphate
  modified_base 8: mod_base = OTHER; note = 2'-O-methylguanosine-3'-phosphate
  modified_base 9: mod_base = OTHER; note = 2'-deoxy-2'-fluorocytidine-3'-phosphate
  modified_base 10: mod_base = OTHER; note = 2'-deoxy-2'-fluorouridine-3'-phosphate
  modified_base 11: mod_base = OTHER; note = 2'-deoxy-2'-fluorouridine-3'-phosphate
  modified_base 12: mod_base = OTHER; note = 2'-O-methylcytidine-3'-phosphate
  modified_base 13: mod_base = OTHER; note = 2'-O-methylguanosine-3'-phosphate
  modified_base 14: mod_base = OTHER; note = 2'-O-methyladenosine-3'-phosphate
  modified_base 15: mod_base = OTHER; note = 2'-O-methyluridine-3'-phosphate
  modified_base 16: mod_base = OTHER; note = 2'-O-methyluridine-3'-phosphate
  modified_base 17: mod_base = OTHER; note = 2'-O-methyluridine-3'-phosphate
  modified_base 18: mod_base = OTHER; note = 2'-O-methylcytidine-3'-phosphate
  modified_base 19: mod_base = OTHER; note = 2'-O-methyladenosine-3'-phosphate
  modified_base 20: mod_base = OTHER; note = 2'-O-methylcytidine-3'-phosphate
  modified_base 21: mod_base = OTHER; note = 2'-O-methyladenosine-3'-phosphate ((2S,4R)-1-[29-[[2-(acetylamino)-2-deoxy-beta-D-galactopyra nosyl]oxy]-14,14-bis[[3-[[3-[[5-[[2-(acetylamino)-2-deoxy-b eta-D-galactopyranosyl]oxy]-1-oxopentyl]amino]propyl]amino] -3-oxopropoxy]methyl]-1,12,19,25-tetraoxo-16-oxa-13,20,24-t riazanonacos-1-yl]-4-hydroxy-2-pyrrolidinyl)methyl ester
gagtcctgcttcgatttcaca

SEQ ID NO: 229 - RNA, 21 nt, synthetic construct
  source 1..21: mol_type = other RNA
  modified_base 1: mod_base = OTHER; note = 2'-O-methyladenosine-3'-phosphorothioate
  modified_base 2: mod_base = OTHER; note = 2'-O-methylguanosine-3'-phosphorothioate
  modified_base 3: mod_base = OTHER; note = 2'-O-methyluridine-3'-phosphate
  modified_base 4: mod_base = OTHER; note = 2'-O-methylcytidine-3'-phosphate
  modified_base 5: mod_base = OTHER; note = 2'-O-methylcytidine-3'-phosphate
  modified_base 6: mod_base = OTHER; note = 2'-O-methyluridine-3'-phosphate
  modified_base 7: mod_base = OTHER; note = 2'-deoxy-2'-fluoroguanosine-3'-phosphate
  modified_base 8: mod_base = OTHER; note = 2'-O-methylcytidine-3'-phosphate
  modified_base 9: mod_base = OTHER; note = 2'-deoxy-2'-fluorouridine-3'-phosphate
  modified_base 10: mod_base = OTHER; note = 2'-deoxy-2'-fluorouridine-3'-phosphate
  modified_base 11: mod_base = OTHER; note = 2'-deoxy-2'-fluorocytidine-3'-phosphate
  modified_base 12: mod_base = OTHER; note = 2'-O-methylguanosine-3'-phosphate
  modified_base 13: mod_base = OTHER; note = 2'-O-methyladenosine-3'-phosphate
  modified_base 14: mod_base = OTHER; note = 2'-O-methyluridine-3'-phosphate
  modified_base 15: mod_base = OTHER; note = 2'-O-methyluridine-3'-phosphate
  modified_base 16: mod_base = OTHER; note = 2'-O-methyluridine-3'-phosphate
  modified_base 17: mod_base = OTHER; note = 2'-O-methylcytidine-3'-phosphate
  modified_base 18: mod_base = OTHER; note = 2'-O-methyladenosine-3'-phosphate
  modified_base 19: mod_base = OTHER; note = 2'-O-methylcytidine-3'-phosphate
  modified_base 20: mod_base = OTHER; note = 2'-O-methylcytidine-3'-phosphate
  modified_base 21: mod_base = OTHER; note = 2'-O-methyladenosine-3'-phosphate ((2S,4R)-1-[29-[[2-(acetylamino)-2-deoxy-beta-D-galactopyra nosyl]oxy]-14,14-bis[[3-[[3-[[5-[[2-(acetylamino)-2-deoxy-b eta-D-galactopyranosyl]oxy]-1-oxopentyl]amino]propyl]amino] -3-oxopropoxy]methyl]-1,12,19,25-tetraoxo-16-oxa-13,20,24-t riazanonacos-1-yl]-4-hydroxy-2-pyrrolidinyl)methyl ester
agtcctgcttcgatttcacca

SEQ ID NO: 230 - RNA, 21 nt, synthetic construct
  source 1..21: mol_type = other RNA
  modified_base 1: mod_base = OTHER; note = 2'-O-methylcytidine-3'-phosphorothioate
  modified_base 2: mod_base = OTHER; note = 2'-O-methyladenosine-3'-phosphorothioate
  modified_base 3: mod_base = OTHER; note = 2'-O-methylcytidine-3'-phosphate
  modified_base 4: mod_base = OTHER; note = 2'-O-methylcytidine-3'-phosphate
  modified_base 5: mod_base = OTHER; note = 2'-O-methylcytidine-3'-phosphate
  modified_base 6: mod_base = OTHER; note = 2'-O-methyluridine-3'-phosphate
  modified_base 7: mod_base = OTHER; note = 2'-deoxy-2'-fluorouridine-3'-phosphate
  modified_base 8: mod_base = OTHER; note = 2'-O-methyluridine-3'-phosphate
  modified_base 9: mod_base = OTHER; note = 2'-deoxy-2'-fluoroguanosine-3'-phosphate
  modified_base 10: mod_base = OTHER; note = 2'-deoxy-2'-fluorocytidine-3'-phosphate
  modified_base 11: mod_base = OTHER; note = 2'-deoxy-2'-fluoroadenosine-3'-phosphate
  modified_base 12: mod_base = OTHER; note = 2'-O-methyladenosine-3'-phosphate
  modified_base 13: mod_base = OTHER; note = 2'-O-methylguanosine-3'-phosphate
  modified_base 14: mod_base = OTHER; note = 2'-O-methyladenosine-3'-phosphate
  modified_base 15: mod_base = OTHER; note = 2'-O-methyladenosine-3'-phosphate
  modified_base 16: mod_base = OTHER; note = 2'-O-methyladenosine-3'-phosphate
  modified_base 17: mod_base = OTHER; note = 2'-O-methyladenosine-3'-phosphate
  modified_base 18: mod_base = OTHER; note = 2'-O-methyladenosine-3'-phosphate
  modified_base 19: mod_base = OTHER; note = 2'-O-methylcytidine-3'-phosphate
  modified_base 20: mod_base = OTHER; note = 2'-O-methylguanosine-3'-phosphate
  modified_base 21: mod_base = OTHER; note = 2'-O-methyladenosine-3'-phosphate ((2S,4R)-1-[29-[[2-(acetylamino)-2-deoxy-beta-D-galactopyra nosyl]oxy]-14,14-bis[[3-[[3-[[5-[[2-(acetylamino)-2-deoxy-b eta-D-galactopyranosyl]oxy]-1-oxopentyl]amino]propyl]amino] -3-oxopropoxy]methyl]-1,12,19,25-tetraoxo-16-oxa-13,20,24-t riazanonacos-1-yl]-4-hydroxy-2-pyrrolidinyl)methyl ester
caccctttgcaagaaaaacga

SEQ ID NO: 231 - RNA, 21 nt, synthetic construct
  source 1..21: mol_type = other RNA
  modified_base 1: mod_base = OTHER; note = 2'-O-methylcytidine-3'-phosphorothioate
  modified_base 2: mod_base = OTHER; note = 2'-O-methylcytidine-3'-phosphorothioate
  modified_base 3: mod_base = OTHER; note = 2'-O-methylcytidine-3'-phosphate
  modified_base 4: mod_base = OTHER; note = 2'-O-methyluridine-3'-phosphate
  modified_base 5: mod_base = OTHER; note = 2'-O-methyluridine-3'-phosphate
  modified_base 6: mod_base = OTHER; note = 2'-O-methyluridine-3'-phosphate
  modified_base 7: mod_base = OTHER; note = 2'-deoxy-2'-fluoroguanosine-3'-phosphate
  modified_base 8: mod_base = OTHER; note = 2'-O-methylcytidine-3'-phosphate
  modified_base 9: mod_base = OTHER; note = 2'-deoxy-2'-fluoroadenosine-3'-phosphate
  modified_base 10: mod_base = OTHER; note = 2'-deoxy-2'-fluoroadenosine-3'-phosphate
  modified_base 11: mod_base = OTHER; note = 2'-deoxy-2'-fluoroguanosine-3'-phosphate
  modified_base 12: mod_base = OTHER; note = 2'-O-methyladenosine-3'-phosphate
  modified_base 13: mod_base = OTHER; note = 2'-O-methyladenosine-3'-phosphate
  modified_base 14: mod_base = OTHER; note = 2'-O-methyladenosine-3'-phosphate
  modified_base 15: mod_base = OTHER; note = 2'-O-methyladenosine-3'-phosphate
  modified_base 16: mod_base = OTHER; note = 2'-O-methyladenosine-3'-phosphate
  modified_base 17: mod_base = OTHER; note = 2'-O-methylcytidine-3'-phosphate
  modified_base 18: mod_base = OTHER; note = 2'-O-methylguanosine-3'-phosphate
  modified_base 19: mod_base = OTHER; note = 2'-O-methylguanosine-3'-phosphate
  modified_base 20: mod_base = OTHER; note = 2'-O-methylcytidine-3'-phosphate
  modified_base 21: mod_base = OTHER; note = 2'-O-methyladenosine-3'-phosphate ((2S,4R)-1-[29-[[2-(acetylamino)-2-deoxy-beta-D-galactopyra nosyl]oxy]-14,14-bis[[3-[[3-[[5-[[2-(acetylamino)-2-deoxy-b eta-D-galactopyranosyl]oxy]-1-oxopentyl]amino]propyl]amino] -3-oxopropoxy]methyl]-1,12,19,25-tetraoxo-16-oxa-13,20,24-t riazanonacos-1-yl]-4-hydroxy-2-pyrrolidinyl)methyl ester
ccctttgcaagaaaaacggca

SEQ ID NO: 232 - RNA, 21 nt, synthetic construct
  source 1..21: mol_type = other RNA
  modified_base 1: mod_base = OTHER; note = 2'-O-methyladenosine-3'-phosphorothioate
  modified_base 2: mod_base = OTHER; note = 2'-O-methyladenosine-3'-phosphorothioate
  modified_base 3: mod_base = OTHER; note = 2'-O-methyladenosine-3'-phosphate
  modified_base 4: mod_base = OTHER; note = 2'-O-methyladenosine-3'-phosphate
  modified_base 5: mod_base = OTHER; note = 2'-O-methyladenosine-3'-phosphate
  modified_base 6: mod_base = OTHER; note = 2'-O-methylcytidine-3'-phosphate
  modified_base 7: mod_base = OTHER; note = 2'-deoxy-2'-fluoroguanosine-3'-phosphate
  modified_base 8: mod_base = OTHER; note = 2'-O-methylguanosine-3'-phosphate
  modified_base 9: mod_base = OTHER; note = 2'-deoxy-2'-fluorocytidine-3'-phosphate
  modified_base 10: mod_base = OTHER; note = 2'-deoxy-2'-fluorouridine-3'-phosphate
  modified_base 11: mod_base = OTHER; note = 2'-deoxy-2'-fluorouridine-3'-phosphate
  modified_base 12: mod_base = OTHER; note = 2'-O-methylcytidine-3'-phosphate
  modified_base 13: mod_base = OTHER; note = 2'-O-methyladenosine-3'-phosphate
  modified_base 14: mod_base = OTHER; note = 2'-O-methyladenosine-3'-phosphate
  modified_base 15: mod_base = OTHER; note = 2'-O-methyladenosine-3'-phosphate
  modified_base 16: mod_base = OTHER; note = 2'-O-methylguanosine-3'-phosphate
  modified_base 17: mod_base = OTHER; note = 2'-O-methyluridine-3'-phosphate
  modified_base 18: mod_base = OTHER; note = 2'-O-methylcytidine-3'-phosphate
  modified_base 19: mod_base = OTHER; note = 2'-O-methyluridine-3'-phosphate
  modified_base 20: mod_base = OTHER; note = 2'-O-methyladenosine-3'-phosphate
  modified_base 21: mod_base = OTHER; note = 2'-O-methyladenosine-3'-phosphate ((2S,4R)-1-[29-[[2-(acetylamino)-2-deoxy-beta-D-galactopyra nosyl]oxy]-14,14-bis[[3-[[3-[[5-[[2-(acetylamino)-2-deoxy-b eta-D-galactopyranosyl]oxy]-1-oxopentyl]amino]propyl]amino] -3-oxopropoxy]methyl]-1,12,19,25-tetraoxo-16-oxa-13,20,24-t riazanonacos-1-yl]-4-hydroxy-2-pyrrolidinyl)methyl ester
aaaaacggcttcaaagtctaa

SEQ ID NO: 233 - RNA, 21 nt, synthetic construct
  source 1..21: mol_type = other RNA
  modified_base 1: mod_base = OTHER; note = 2'-O-methyladenosine-3'-phosphorothioate
  modified_base 2: mod_base = OTHER; note = 2'-O-methyladenosine-3'-phosphorothioate
  modified_base 3: mod_base = OTHER; note = 2'-O-methylcytidine-3'-phosphate
  modified_base 4: mod_base = OTHER; note = 2'-O-methylguanosine-3'-phosphate
  modified_base 5: mod_base = OTHER; note = 2'-O-methylguanosine-3'-phosphate
  modified_base 6: mod_base = OTHER; note = 2'-O-methylcytidine-3'-phosphate
  modified_base 7: mod_base = OTHER; note = 2'-deoxy-2'-fluorouridine-3'-phosphate
  modified_base 8: mod_base = OTHER; note = 2'-O-methyluridine-3'-phosphate
  modified_base 9: mod_base = OTHER; note = 2'-deoxy-2'-fluorocytidine-3'-phosphate
  modified_base 10: mod_base = OTHER; note = 2'-deoxy-2'-fluoroadenosine-3'-phosphate
  modified_base 11: mod_base = OTHER; note = 2'-deoxy-2'-fluoroadenosine-3'-phosphate
  modified_base 12: mod_base = OTHER; note = 2'-O-methyladenosine-3'-phosphate
  modified_base 13: mod_base = OTHER; note = 2'-O-methylguanosine-3'-phosphate
  modified_base 14: mod_base = OTHER; note = 2'-O-methyluridine-3'-phosphate
  modified_base 15: mod_base = OTHER; note = 2'-O-methylcytidine-3'-phosphate
  modified_base 16: mod_base = OTHER; note = 2'-O-methyluridine-3'-phosphate
  modified_base 17: mod_base = OTHER; note = 2'-O-methyladenosine-3'-phosphate
  modified_base 18: mod_base = OTHER; note = 2'-O-methylcytidine-3'-phosphate
  modified_base 19: mod_base = OTHER; note = 2'-O-methylguanosine-3'-phosphate
  modified_base 20: mod_base = OTHER; note = 2'-O-methyluridine-3'-phosphate
  modified_base 21: mod_base = OTHER; note = 2'-O-methyladenosine-3'-phosphate ((2S,4R)-1-[29-[[2-(acetylamino)-2-deoxy-beta-D-galactopyra nosyl]oxy]-14,14-bis[[3-[[3-[[5-[[2-(acetylamino)-2-deoxy-b eta-D-galactopyranosyl]oxy]-1-oxopentyl]amino]propyl]amino] -3-oxopropoxy]methyl]-1,12,19,25-tetraoxo-16-oxa-13,20,24-t riazanonacos-1-yl]-4-hydroxy-2-pyrrolidinyl)methyl ester
aacggcttcaaagtctacgta

SEQ ID NO: 234 - RNA, 21 nt, synthetic construct
  source 1..21: mol_type = other RNA
  modified_base 1: mod_base = OTHER; note = 2'-O-methyluridine-3'-phosphorothioate
  modified_base 2: mod_base = OTHER; note = 2'-O-methyluridine-3'-phosphorothioate
  modified_base 3: mod_base = OTHER; note = 2'-O-methyladenosine-3'-phosphate
  modified_base 4: mod_base = OTHER; note = 2'-O-methylcytidine-3'-phosphate
  modified_base 5: mod_base = OTHER; note = 2'-O-methylcytidine-3'-phosphate
  modified_base 6: mod_base = OTHER; note = 2'-O-methyladenosine-3'-phosphate
  modified_base 7: mod_base = OTHER; note = 2'-deoxy-2'-fluoroadenosine-3'-phosphate
  modified_base 8: mod_base = OTHER; note = 2'-O-methyladenosine-3'-phosphate
  modified_base 9: mod_base = OTHER; note = 2'-deoxy-2'-fluoroadenosine-3'-phosphate
  modified_base 10: mod_base = OTHER; note = 2'-deoxy-2'-fluorocytidine-3'-phosphate
  modified_base 11: mod_base = OTHER; note = 2'-deoxy-2'-fluoroadenosine-3'-phosphate
  modified_base 12: mod_base = OTHER; note = 2'-O-methyluridine-3'-phosphate
  modified_base 13: mod_base = OTHER; note = 2'-O-methyluridine-3'-phosphate
  modified_base 14: mod_base = OTHER; note = 2'-O-methylcytidine-3'-phosphate
  modified_base 15: mod_base = OTHER; note = 2'-O-methyluridine-3'-phosphate
  modified_base 16: mod_base = OTHER; note = 2'-O-methyladenosine-3'-phosphate
  modified_base 17: mod_base = OTHER; note = 2'-O-methylguanosine-3'-phosphate
  modified_base 18: mod_base = OTHER; note = 2'-O-methylcytidine-3'-phosphate
  modified_base 19: mod_base = OTHER; note = 2'-O-methylguanosine-3'-phosphate
  modified_base 20: mod_base = OTHER; note = 2'-O-methylguanosine-3'-phosphate
  modified_base 21: mod_base = OTHER; note = 2'-O-methyladenosine-3'-phosphate ((2S,4R)-1-[29-[[2-(acetylamino)-2-deoxy-beta-D-galactopyra nosyl]oxy]-14,14-bis[[3-[[3-[[5-[[2-(acetylamino)-2-deoxy-b eta-D-galactopyranosyl]oxy]-1-oxopentyl]amino]propyl]amino] -3-oxopropoxy]methyl]-1,12,19,25-tetraoxo-16-oxa-13,20,24-t riazanonacos-1-yl]-4-hydroxy-2-pyrrolidinyl)methyl ester
ttaccaaaacattctagcgga

SEQ ID NO: 235 - RNA, 21 nt, synthetic construct
  source 1..21: mol_type = other RNA
  modified_base 1: mod_base = OTHER; note = 2'-O-methylcytidine-3'-phosphorothioate
  modified_base 2: mod_base = OTHER; note = 2'-O-methyluridine-3'-phosphorothioate
  modified_base 3: mod_base = OTHER; note = 2'-O-methyluridine-3'-phosphate
  modified_base 4: mod_base = OTHER; note = 2'-O-methyluridine-3'-phosphate
  modified_base 5: mod_base = OTHER; note = 2'-O-methylguanosine-3'-phosphate
  modified_base 6: mod_base = OTHER; note = 2'-O-methyluridine-3'-phosphate
  modified_base 7: mod_base = OTHER; note = 2'-deoxy-2'-fluorocytidine-3'-phosphate
  modified_base 8: mod_base = OTHER; note = 2'-O-methyluridine-3'-phosphate
  modified_base 9: mod_base = OTHER; note = 2'-deoxy-2'-fluorouridine-3'-phosphate
  modified_base 10: mod_base = OTHER; note = 2'-deoxy-2'-fluoroguanosine-3'-phosphate
  modified_base 11: mod_base = OTHER; note = 2'-deoxy-2'-fluoroadenosine-3'-phosphate
  modified_base 12: mod_base = OTHER; note = 2'-O-methylguanosine-3'-phosphate
  modified_base 13: mod_base = OTHER; note = 2'-O-methyluridine-3'-phosphate
  modified_base 14: mod_base = OTHER; note = 2'-O-methylcytidine-3'-phosphate
  modified_base 15: mod_base = OTHER; note = 2'-O-methyluridine-3'-phosphate
  modified_base 16: mod_base = OTHER; note = 2'-O-methylguanosine-3'-phosphate
  modified_base 17: mod_base = OTHER; note = 2'-O-methylguanosine-3'-phosphate
  modified_base 18: mod_base = OTHER; note = 2'-O-methyladenosine-3'-phosphate
  modified_base 19: mod_base = OTHER; note = 2'-O-methyluridine-3'-phosphate
  modified_base 20: mod_base = OTHER; note = 2'-O-methyladenosine-3'-phosphate
  modified_base 21: mod_base = OTHER; note = 2'-O-methyladenosine-3'-phosphate ((2S,4R)-1-[29-[[2-(acetylamino)-2-deoxy-beta-D-galactopyra nosyl]oxy]-14,14-bis[[3-[[3-[[5-[[2-(acetylamino)-2-deoxy-b eta-D-galactopyranosyl]oxy]-1-oxopentyl]amino]propyl]amino] -3-oxopropoxy]methyl]-1,12,19,25-tetraoxo-16-oxa-13,20,24-t riazanonacos-1-yl]-4-hydroxy-2-pyrrolidinyl)methyl ester
ctttgtcttgagtctggataa

SEQ ID NO: 236 - RNA, 21 nt, synthetic construct
  source 1..21: mol_type = other RNA
  modified_base 1: mod_base = OTHER; note = 2'-O-methylcytidine-3'-phosphorothioate
  modified_base 2: mod_base = OTHER; note = 2'-O-methyluridine-3'-phosphorothioate
  modified_base 3: mod_base = OTHER; note = 2'-O-methyluridine-3'-phosphate
  modified_base 4: mod_base = OTHER; note = 2'-O-methylguanosine-3'-phosphate
  modified_base 5: mod_base = OTHER; note = 2'-O-methyladenosine-3'-phosphate
  modified_base 6: mod_base = OTHER; note = 2'-O-methylguanosine-3'-phosphate
  modified_base 7: mod_base = OTHER; note = 2'-deoxy-2'-fluorouridine-3'-phosphate
  modified_base 8: mod_base = OTHER; note = 2'-O-methylcytidine-3'-phosphate
  modified_base 9: mod_base = OTHER; note = 2'-deoxy-2'-fluorouridine-3'-phosphate
  modified_base 10: mod_base = OTHER; note = 2'-deoxy-2'-fluoroguanosine-3'-phosphate
  modified_base 11: mod_base = OTHER; note = 2'-deoxy-2'-fluoroguanosine-3'-phosphate
  modified_base 12: mod_base = OTHER; note = 2'-O-methyladenosine-3'-phosphate
  modified_base 13: mod_base = OTHER; note = 2'-O-methyluridine-3'-phosphate
  modified_base 14: mod_base = OTHER; note = 2'-O-methyladenosine-3'-phosphate
  modified_base 15: mod_base = OTHER; note = 2'-O-methylcytidine-3'-phosphate
  modified_base 16: mod_base = OTHER; note = 2'-O-methyluridine-3'-phosphate
  modified_base 17: mod_base = OTHER; note = 2'-O-methyluridine-3'-phosphate
  modified_base 18: mod_base = OTHER; note = 2'-O-methyluridine-3'-phosphate
  modified_base 19: mod_base = OTHER; note = 2'-O-methyladenosine-3'-phosphate
  modified_base 20: mod_base = OTHER; note = 2'-O-methylguanosine-3'-phosphate
  modified_base 21: mod_base = OTHER; note = 2'-O-methyladenosine-3'-phosphate ((2S,4R)-1-[29-[[2-(acetylamino)-2-deoxy-beta-D-galactopyra nosyl]oxy]-14,14-bis[[3-[[3-[[5-[[2-(acetylamino)-2-deoxy-b eta-D-galactopyranosyl]oxy]-1-oxopentyl]amino]propyl]amino] -3-oxopropoxy]methyl]-1,12,19,25-tetraoxo-16-oxa-13,20,24-t riazanonacos-1-yl]-4-hydroxy-2-pyrrolidinyl)methyl ester
cttgagtctggatactttaga

SEQ ID NO: 237 - RNA, 21 nt, synthetic construct
  source 1..21: mol_type = other RNA
  modified_base 1: mod_base = OTHER; note = 2'-O-methylguanosine-3'-phosphorothioate
  modified_base 2: mod_base = OTHER; note = 2'-O-methyluridine-3'-phosphorothioate
  modified_base 3: mod_base = OTHER; note = 2'-O-methylcytidine-3'-phosphate
  modified_base 4: mod_base = OTHER; note = 2'-O-methyluridine-3'-phosphate
  modified_base 5: mod_base = OTHER; note = 2'-O-methylguanosine-3'-phosphate
  modified_base 6: mod_base = OTHER; note = 2'-O-methylguanosine-3'-phosphate
  modified_base 7: mod_base = OTHER; note = 2'-deoxy-2'-fluoroadenosine-3'-phosphate
  modified_base 8: mod_base = OTHER; note = 2'-O-methyluridine-3'-phosphate
  modified_base 9: mod_base = OTHER; note = 2'-deoxy-2'-fluoroadenosine-3'-phosphate
  modified_base 10: mod_base = OTHER; note = 2'-deoxy-2'-fluorocytidine-3'-phosphate
  modified_base 11: mod_base = OTHER; note = 2'-deoxy-2'-fluorouridine-3'-phosphate
  modified_base 12: mod_base = OTHER; note = 2'-O-methyluridine-3'-phosphate
  modified_base 13: mod_base = OTHER; note = 2'-O-methyluridine-3'-phosphate
  modified_base 14: mod_base = OTHER; note = 2'-O-methyladenosine-3'-phosphate
  modified_base 15: mod_base = OTHER; note = 2'-O-methylguanosine-3'-phosphate
  modified_base 16: mod_base = OTHER; note = 2'-O-methyladenosine-3'-phosphate
  modified_base 17: mod_base = OTHER; note = 2'-O-methylcytidine-3'-phosphate
  modified_base 18: mod_base = OTHER; note = 2'-O-methyladenosine-3'-phosphate
  modified_base 19: mod_base = OTHER; note = 2'-O-methylguanosine-3'-phosphate
  modified_base 20: mod_base = OTHER; note = 2'-O-methyladenosine-3'-phosphate
  modified_base 21: mod_base = OTHER; note = 2'-O-methyladenosine-3'-phosphate ((2S,4R)-1-[29-[[2-(acetylamino)-2-deoxy-beta-D-galactopyra nosyl]oxy]-14,14-bis[[3-[[3-[[5-[[2-(acetylamino)-2-deoxy-b eta-D-galactopyranosyl]oxy]-1-oxopentyl]amino]propyl]amino] -3-oxopropoxy]methyl]-1,12,19,25-tetraoxo-16-oxa-13,20,24-t riazanonacos-1-yl]-4-hydroxy-2-pyrrolidinyl)methyl ester
gtctggatactttagacagaa

SEQ ID NO: 238 - RNA, 21 nt, synthetic construct
  source 1..21: mol_type = other RNA
  modified_base 1: mod_base = OTHER; note = 2'-O-methylguanosine-3'-phosphorothioate
  modified_base 2: mod_base = OTHER; note = 2'-O-methyluridine-3'-phosphorothioate
  modified_base 3: mod_base = OTHER; note = 2'-O-methylguanosine-3'-phosphate
  modified_base 4: mod_base = OTHER; note = 2'-O-methylcytidine-3'-phosphate
  modified_base 5: mod_base = OTHER; note = 2'-O-methyladenosine-3'-phosphate
  modified_base 6: mod_base = OTHER; note = 2'-O-methylcytidine-3'-phosphate
  modified_base 7: mod_base = OTHER; note = 2'-deoxy-2'-fluoroadenosine-3'-phosphate
  modified_base 8: mod_base = OTHER; note = 2'-O-methyladenosine-3'-phosphate
  modified_base 9: mod_base = OTHER; note = 2'-deoxy-2'-fluorouridine-3'-phosphate
  modified_base 10: mod_base = OTHER; note = 2'-deoxy-2'-fluorouridine-3'-phosphate
  modified_base 11: mod_base = OTHER; note = 2'-deoxy-2'-fluorouridine-3'-phosphate
  modified_base 12: mod_base = OTHER; note = 2'-O-methylguanosine-3'-phosphate
  modified_base 13: mod_base = OTHER; note = 2'-O-methyladenosine-3'-phosphate
  modified_base 14: mod_base = OTHER; note = 2'-O-methylguanosine-3'-phosphate
  modified_base 15: mod_base = OTHER; note = 2'-O-methyladenosine-3'-phosphate
  modified_base 16: mod_base = OTHER; note = 2'-O-methyluridine-3'-phosphate
  modified_base 17: mod_base = OTHER; note = 2'-O-methylcytidine-3'-phosphate
  modified_base 18: mod_base = OTHER; note = 2'-O-methylcytidine-3'-phosphate
  modified_base 19: mod_base = OTHER; note = 2'-O-methyladenosine-3'-phosphate
  modified_base 20: mod_base = OTHER; note = 2'-O-methyladenosine-3'-phosphate
  modified_base 21: mod_base = OTHER; note = 2'-O-methyladenosine-3'-phosphate ((2S,4R)-1-[29-[[2-(acetylamino)-2-deoxy-beta-D-galactopyra nosyl]oxy]-14,14-bis[[3-[[3-[[5-[[2-(acetylamino)-2-deoxy-b eta-D-galactopyranosyl]oxy]-1-oxopentyl]amino]propyl]amino] -3-oxopropoxy]methyl]-1,12,19,25-tetraoxo-16-oxa-13,20,24-t riazanonacos-1-yl]-4-hydroxy-2-pyrrolidinyl)methyl ester
gtgcacaatttgagatccaaa

SEQ ID NO: 239 - RNA, 21 nt, synthetic construct
  source 1..21: mol_type = other RNA
  modified_base 1: mod_base = OTHER; note = 2'-O-methylguanosine-3'-phosphorothioate
  modified_base 2: mod_base = OTHER; note = 2'-O-methyluridine-3'-phosphorothioate
  modified_base 3: mod_base = OTHER; note = 2'-O-methylguanosine-3'-phosphate
  modified_base 4: mod_base = OTHER; note = 2'-O-methylguanosine-3'-phosphate
  modified_base 5: mod_base = OTHER; note = 2'-O-methyladenosine-3'-phosphate
  modified_base 6: mod_base = OTHER; note = 2'-O-methyladenosine-3'-phosphate
  modified_base 7: mod_base = OTHER; note = 2'-deoxy-2'-fluorocytidine-3'-phosphate
  modified_base 8: mod_base = OTHER; note = 2'-O-methyladenosine-3'-phosphate
  modified_base 9: mod_base = OTHER; note = 2'-deoxy-2'-fluoroadenosine-3'-phosphate
  modified_base 10: mod_base = OTHER; note = 2'-deoxy-2'-fluorouridine-3'-phosphate
  modified_base 11: mod_base = OTHER; note = 2'-deoxy-2'-fluoroguanosine-3'-phosphate
  modified_base 12: mod_base = OTHER; note = 2'-O-methylguanosine-3'-phosphate
  modified_base 13: mod_base = OTHER; note = 2'-O-methyluridine-3'-phosphate
  modified_base 14: mod_base = OTHER; note = 2'-O-methyladenosine-3'-phosphate
  modified_base 15: mod_base = OTHER; note = 2'-O-methylguanosine-3'-phosphate
  modified_base 16: mod_base = OTHER; note = 2'-O-methylguanosine-3'-phosphate
  modified_base 17: mod_base = OTHER; note = 2'-O-methyladenosine-3'-phosphate
  modified_base 18: mod_base = OTHER; note = 2'-O-methyladenosine-3'-phosphate
  modified_base 19: mod_base = OTHER; note = 2'-O-methyluridine-3'-phosphate
  modified_base 20: mod_base = OTHER; note = 2'-O-methylcytidine-3'-phosphate
  modified_base 21: mod_base = OTHER; note = 2'-O-methyladenosine-3'-phosphate ((2S,4R)-1-[29-[[2-(acetylamino)-2-deoxy-beta-D-galactopyra nosyl]oxy]-14,14-bis[[3-[[3-[[5-[[2-(acetylamino)-2-deoxy-b eta-D-galactopyranosyl]oxy]-1-oxopentyl]amino]propyl]amino] -3-oxopropoxy]methyl]-1,12,19,25-tetraoxo-16-oxa-13,20,24-t riazanonacos-1-yl]-4-hydroxy-2-pyrrolidinyl)methyl ester
gtggaacaatggtaggaatca

SEQ ID NO: 240 - RNA, 21 nt, synthetic construct
  source 1..21: mol_type = other RNA
  modified_base 1: mod_base = OTHER; note = 2'-O-methylguanosine-3'-phosphorothioate
  modified_base 2: mod_base = OTHER; note = 2'-O-methyladenosine-3'-phosphorothioate
  modified_base 3: mod_base = OTHER; note = 2'-O-methyladenosine-3'-phosphate
  modified_base 4: mod_base = OTHER; note = 2'-O-methylcytidine-3'-phosphate
  modified_base 5: mod_base = OTHER; note = 2'-O-methyladenosine-3'-phosphate
  modified_base 6: mod_base = OTHER; note = 2'-O-methyladenosine-3'-phosphate
  modified_base 7: mod_base = OTHER; note = 2'-deoxy-2'-fluorouridine-3'-phosphate
  modified_base 8: mod_base = OTHER; note = 2'-O-methylguanosine-3'-phosphate
  modified_base 9: mod_base = OTHER; note = 2'-deoxy-2'-fluoroguanosine-3'-phosphate
  modified_base 10: mod_base = OTHER; note = 2'-deoxy-2'-fluorouridine-3'-phosphate
  modified_base 11: mod_base = OTHER; note = 2'-deoxy-2'-fluoroadenosine-3'-phosphate
  modified_base 12: mod_base = OTHER; note = 2'-O-methylguanosine-3'-phosphate
  modified_base 13: mod_base = OTHER; note = 2'-O-methylguanosine-3'-phosphate
  modified_base 14: mod_base = OTHER; note = 2'-O-methyladenosine-3'-phosphate
  modified_base 15: mod_base = OTHER; note = 2'-O-methyladenosine-3'-phosphate
  modified_base 16: mod_base = OTHER; note = 2'-O-methyluridine-3'-phosphate
  modified_base 17: mod_base = OTHER; note = 2'-O-methylcytidine-3'-phosphate
  modified_base 18: mod_base = OTHER; note = 2'-O-methyladenosine-3'-phosphate
  modified_base 19: mod_base = OTHER; note = 2'-O-methyluridine-3'-phosphate
  modified_base 20: mod_base = OTHER; note = 2'-O-methyluridine-3'-phosphate
  modified_base 21: mod_base = OTHER; note = 2'-O-methyladenosine-3'-phosphate ((2S,4R)-1-[29-[[2-(acetylamino)-2-deoxy-beta-D-galactopyra nosyl]oxy]-14,14-bis[[3-[[3-[[5-[[2-(acetylamino)-2-deoxy-b eta-D-galactopyranosyl]oxy]-1-oxopentyl]amino]propyl]amino] -3-oxopropoxy]methyl]-1,12,19,25-tetraoxo-16-oxa-13,20,24-t riazanonacos-1-yl]-4-hydroxy-2-pyrrolidinyl)methyl ester
gaacaatggtaggaatcatta

SEQ ID NO: 241 - RNA, 21 nt, synthetic construct
  source 1..21: mol_type = other RNA
  modified_base 1: mod_base = OTHER; note = 2'-O-methyladenosine-3'-phosphorothioate
  modified_base 2: mod_base = OTHER; note = 2'-O-methyluridine-3'-phosphorothioate
  modified_base 3: mod_base = OTHER; note = 2'-O-methylcytidine-3'-phosphate
  modified_base 4: mod_base = OTHER; note = 2'-O-methyladenosine-3'-phosphate
  modified_base 5: mod_base = OTHER; note = 2'-O-methylguanosine-3'-phosphate
  modified_base 6: mod_base = OTHER; note = 2'-O-methyluridine-3'-phosphate
  modified_base 7: mod_base = OTHER; note = 2'-deoxy-2'-fluoroadenosine-3'-phosphate
  modified_base 8: mod_base = OTHER; note = 2'-O-methylcytidine-3'-phosphate
  modified_base 9: mod_base = OTHER; note = 2'-deoxy-2'-fluorouridine-3'-phosphate
  modified_base 10: mod_base = OTHER; note = 2'-deoxy-2'-fluoroguanosine-3'-phosphate
  modified_base 11: mod_base = OTHER; note = 2'-deoxy-2'-fluoroadenosine-3'-phosphate
  modified_base 12: mod_base = OTHER; note = 2'-O-methyladenosine-3'-phosphate
  modified_base 13: mod_base = OTHER; note = 2'-O-methyladenosine-3'-phosphate
  modified_base 14: mod_base = OTHER; note = 2'-O-methyladenosine-3'-phosphate
  modified_base 15: mod_base = OTHER; note = 2'-O-methylcytidine-3'-phosphate
  modified_base 16: mod_base = OTHER; note = 2'-O-methyluridine-3'-phosphate
  modified_base 17: mod_base = OTHER; note = 2'-O-methyluridine-3'-phosphate
  modified_base 18: mod_base = OTHER; note = 2'-O-methylcytidine-3'-phosphate
  modified_base 19: mod_base = OTHER; note = 2'-O-methylcytidine-3'-phosphate
  modified_base 20: mod_base = OTHER; note = 2'-O-methylguanosine-3'-phosphate
  modified_base 21: mod_base = OTHER; note = 2'-O-methyladenosine-3'-phosphate ((2S,4R)-1-[29-[[2-(acetylamino)-2-deoxy-beta-D-galactopyra nosyl]oxy]-14,14-bis[[3-[[3-[[5-[[2-(acetylamino)-2-deoxy-b eta-D-galactopyranosyl]oxy]-1-oxopentyl]amino]propyl]amino] -3-oxopropoxy]methyl]-1,12,19,25-tetraoxo-16-oxa-13,20,24-t riazanonacos-1-yl]-4-hydroxy-2-pyrrolidinyl)methyl ester
atcagtactgaaaacttccga

SEQ ID NO: 242 - RNA, 21 nt, synthetic construct
  source 1..21: mol_type = other RNA
  modified_base 1: mod_base = OTHER; note = 2'-O-methyluridine-3'-phosphorothioate
  modified_base 2: mod_base = OTHER; note = 2'-O-methylcytidine-3'-phosphorothioate
  modified_base 3: mod_base = OTHER; note = 2'-O-methyladenosine-3'-phosphate
  modified_base 4: mod_base = OTHER; note = 2'-O-methylguanosine-3'-phosphate
  modified_base 5: mod_base = OTHER; note = 2'-O-methyluridine-3'-phosphate
  modified_base 6: mod_base = OTHER; note = 2'-O-methyladenosine-3'-phosphate
  modified_base 7: mod_base = OTHER; note = 2'-deoxy-2'-fluorocytidine-3'-phosphate
  modified_base 8: mod_base = OTHER; note = 2'-O-methyluridine-3'-phosphate
  modified_base 9: mod_base = OTHER; note = 2'-deoxy-2'-fluoroguanosine-3'-phosphate
  modified_base 10: mod_base = OTHER; note = 2'-deoxy-2'-fluoroadenosine-3'-phosphate
  modified_base 11: mod_base = OTHER; note = 2'-deoxy-2'-fluoroadenosine-3'-phosphate
  modified_base 12: mod_base = OTHER; note = 2'-O-methyladenosine-3'-phosphate
  modified_base 13: mod_base = OTHER; note = 2'-O-methyladenosine-3'-phosphate
  modified_base 14: mod_base = OTHER; note = 2'-O-methylcytidine-3'-phosphate
  modified_base 15: mod_base = OTHER; note = 2'-O-methyluridine-3'-phosphate
  modified_base 16: mod_base = OTHER; note = 2'-O-methyluridine-3'-phosphate
  modified_base 17: mod_base = OTHER; note = 2'-O-methylcytidine-3'-phosphate
  modified_base 18: mod_base = OTHER; note = 2'-O-methylcytidine-3'-phosphate
  modified_base 19: mod_base = OTHER; note = 2'-O-methylguanosine-3'-phosphate
  modified_base 20: mod_base = OTHER; note = 2'-O-methyladenosine-3'-phosphate
  modified_base 21: mod_base = OTHER; note = 2'-O-methyladenosine-3'-phosphate ((2S,4R)-1-[29-[[2-(acetylamino)-2-deoxy-beta-D-galactopyra nosyl]oxy]-14,14-bis[[3-[[3-[[5-[[2-(acetylamino)-2-deoxy-b eta-D-galactopyranosyl]oxy]-1-oxopentyl]amino]propyl]amino] -3-oxopropoxy]methyl]-1,12,19,25-tetraoxo-16-oxa-13,20,24-t riazanonacos-1-yl]-4-hydroxy-2-pyrrolidinyl)methyl ester
tcagtactgaaaacttccgaa

SEQ ID NO: 243 - RNA, 21 nt, synthetic construct
  source 1..21: mol_type = other RNA
  modified_base 1: mod_base = OTHER; note = 2'-O-methylcytidine-3'-phosphorothioate
  modified_base 2: mod_base = OTHER; note = 2'-O-methyladenosine-3'-phosphorothioate
  modified_base 3: mod_base = OTHER; note = 2'-O-methylguanosine-3'-phosphate
  modified_base 4: mod_base = OTHER; note = 2'-O-methyluridine-3'-phosphate
  modified_base 5: mod_base = OTHER; note = 2'-O-methyladenosine-3'-phosphate
  modified_base 6: mod_base = OTHER; note = 2'-O-methylcytidine-3'-phosphate
  modified_base 7: mod_base = OTHER; note = 2'-deoxy-2'-fluorouridine-3'-phosphate
  modified_base 8: mod_base = OTHER; note = 2'-O-methylguanosine-3'-phosphate
  modified_base 9: mod_base = OTHER; note = 2'-deoxy-2'-fluoroadenosine-3'-phosphate
  modified_base 10: mod_base = OTHER; note = 2'-deoxy-2'-fluoroadenosine-3'-phosphate
  modified_base 11: mod_base = OTHER; note = 2'-deoxy-2'-fluoroadenosine-3'-phosphate
  modified_base 12: mod_base = OTHER; note = 2'-O-methyladenosine-3'-phosphate
  modified_base 13: mod_base = OTHER; note = 2'-O-methylcytidine-3'-phosphate
  modified_base 14: mod_base = OTHER; note = 2'-O-methyluridine-3'-phosphate
  modified_base 15: mod_base = OTHER; note = 2'-O-methyluridine-3'-phosphate
  modified_base 16: mod_base = OTHER; note = 2'-O-methylcytidine-3'-phosphate
  modified_base 17: mod_base = OTHER; note = 2'-O-methylcytidine-3'-phosphate
  modified_base 18: mod_base = OTHER; note = 2'-O-methylguanosine-3'-phosphate
  modified_base 19: mod_base = OTHER; note = 2'-O-methyladenosine-3'-phosphate
  modified_base 20: mod_base = OTHER; note = 2'-O-methylcytidine-3'-phosphate
  modified_base 21: mod_base = OTHER; note = 2'-O-methyladenosine-3'-phosphate ((2S,4R)-1-[29-[[2-(acetylamino)-2-deoxy-beta-D-galactopyra nosyl]oxy]-14,14-bis[[3-[[3-[[5-[[2-(acetylamino)-2-deoxy-b eta-D-galactopyranosyl]oxy]-1-oxopentyl]amino]propyl]amino] -3-oxopropoxy]methyl]-1,12,19,25-tetraoxo-16-oxa-13,20,24-t riazanonacos-1-yl]-4-hydroxy-2-pyrrolidinyl)methyl ester
cagtactgaaaacttccgaca

SEQ ID NO: 244 - RNA, 21 nt, synthetic construct
  source 1..21: mol_type = other RNA
  modified_base 1: mod_base = OTHER; note = 2'-O-methyladenosine-3'-phosphorothioate
  modified_base 2: mod_base = OTHER; note = 2'-O-methylcytidine-3'-phosphorothioate
  modified_base 3: mod_base = OTHER; note = 2'-O-methyluridine-3'-phosphate
  modified_base 4: mod_base = OTHER; note = 2'-O-methylguanosine-3'-phosphate
  modified_base 5: mod_base = OTHER; note = 2'-O-methyladenosine-3'-phosphate
  modified_base 6: mod_base = OTHER; note = 2'-O-methyladenosine-3'-phosphate
  modified_base 7: mod_base = OTHER; note = 2'-deoxy-2'-fluoroadenosine-3'-phosphate
  modified_base 8: mod_base = OTHER; note = 2'-O-methyladenosine-3'-phosphate
  modified_base 9: mod_base = OTHER; note = 2'-deoxy-2'-fluorocytidine-3'-phosphate
  modified_base 10: mod_base = OTHER; note = 2'-deoxy-2'-fluorouridine-3'-phosphate
  modified_base 11: mod_base = OTHER; note = 2'-deoxy-2'-fluorouridine-3'-phosphate
  modified_base 12: mod_base = OTHER; note = 2'-O-methylcytidine-3'-phosphate
  modified_base 13: mod_base = OTHER; note = 2'-O-methylcytidine-3'-phosphate
  modified_base 14: mod_base = OTHER; note = 2'-O-methylguanosine-3'-phosphate
  modified_base 15: mod_base = OTHER; note = 2'-O-methyladenosine-3'-phosphate
  modified_base 16: mod_base = OTHER; note = 2'-O-methylcytidine-3'-phosphate
  modified_base 17: mod_base = OTHER; note = 2'-O-methylcytidine-3'-phosphate
  modified_base 18: mod_base = OTHER; note = 2'-O-methyladenosine-3'-phosphate
  modified_base 19: mod_base = OTHER; note = 2'-O-methyladenosine-3'-phosphate
  modified_base 20: mod_base = OTHER; note = 2'-O-methyladenosine-3'-phosphate
  modified_base 21: mod_base = OTHER; note = 2'-O-methyladenosine-3'-phosphate ((2S,4R)-1-[29-[[2-(acetylamino)-2-deoxy-beta-D-galactopyra nosyl]oxy]-14,14-bis[[3-[[3-[[5-[[2-(acetylamino)-2-deoxy-b eta-D-galactopyranosyl]oxy]-1-oxopentyl]amino]propyl]amino] -3-oxopropoxy]methyl]-1,12,19,25-tetraoxo-16-oxa-13,20,24-t riazanonacos-1-yl]-4-hydroxy-2-pyrrolidinyl)methyl ester
actgaaaacttccgaccaaaa

SEQ ID NO: 245 - RNA, 21 nt, synthetic construct
  source 1..21: mol_type = other RNA
  modified_base 1: mod_base = OTHER; note = 2'-O-methyladenosine-3'-phosphorothioate
  modified_base 2: mod_base = OTHER; note = 2'-O-methylcytidine-3'-phosphorothioate
  modified_base 3: mod_base = OTHER; note = 2'-O-methyluridine-3'-phosphate
  modified_base 4: mod_base = OTHER; note = 2'-O-methyluridine-3'-phosphate
  modified_base 5: mod_base = OTHER; note = 2'-O-methylcytidine-3'-phosphate
  modified_base 6: mod_base = OTHER; note = 2'-O-methylcytidine-3'-phosphate
  modified_base 7: mod_base = OTHER; note = 2'-deoxy-2'-fluoroguanosine-3'-phosphate
  modified_base 8: mod_base = OTHER; note = 2'-O-methyladenosine-3'-phosphate
  modified_base 9: mod_base = OTHER; note = 2'-deoxy-2'-fluorocytidine-3'-phosphate
  modified_base 10: mod_base = OTHER; note = 2'-deoxy-2'-fluorocytidine-3'-phosphate
  modified_base 11: mod_base = OTHER; note = 2'-deoxy-2'-fluoroadenosine-3'-phosphate
  modified_base 12: mod_base = OTHER; note = 2'-O-methyladenosine-3'-phosphate
  modified_base 13: mod_base = OTHER; note = 2'-O-methyladenosine-3'-phosphate
  modified_base 14: mod_base = OTHER; note = 2'-O-methylcytidine-3'-phosphate
  modified_base 15: mod_base = OTHER; note = 2'-O-methyluridine-3'-phosphate
  modified_base 16: mod_base = OTHER; note = 2'-O-methyluridine-3'-phosphate
  modified_base 17: mod_base = OTHER; note = 2'-O-methyluridine-3'-phosphate
  modified_base 18: mod_base = OTHER; note = 2'-O-methylguanosine-3'-phosphate
  modified_base 19: mod_base = OTHER; note = 2'-O-methyladenosine-3'-phosphate
  modified_base 20: mod_base = OTHER; note = 2'-O-methyluridine-3'-phosphate
  modified_base 21: mod_base = OTHER; note = 2'-O-methyladenosine-3'-phosphate ((2S,4R)-1-[29-[[2-(acetylamino)-2-deoxy-beta-D-galactopyra nosyl]oxy]-14,14-bis[[3-[[3-[[5-[[2-(acetylamino)-2-deoxy-b eta-D-galactopyranosyl]oxy]-1-oxopentyl]amino]propyl]amino] -3-oxopropoxy]methyl]-1,12,19,25-tetraoxo-16-oxa-13,20,24-t riazanonacos-1-yl]-4-hydroxy-2-pyrrolidinyl)methyl ester
acttccgaccaaactttgata

SEQ ID NO: 246 - RNA, 21 nt, synthetic construct
  source 1..21: mol_type = other RNA
  modified_base 1: mod_base = OTHER; note = 2'-O-methylcytidine-3'-phosphorothioate
  modified_base 2: mod_base = OTHER; note = 2'-O-methylguanosine-3'-phosphorothioate
  modified_base 3: mod_base = OTHER; note = 2'-O-methyladenosine-3'-phosphate
  modified_base 4: mod_base = OTHER; note = 2'-O-methylcytidine-3'-phosphate
  modified_base 5: mod_base = OTHER; note = 2'-O-methylcytidine-3'-phosphate
  modified_base 6: mod_base = OTHER; note = 2'-O-methyladenosine-3'-phosphate
  modified_base 7: mod_base = OTHER; note = 2'-deoxy-2'-fluoroadenosine-3'-phosphate
  modified_base 8: mod_base = OTHER; note = 2'-O-methyladenosine-3'-phosphate
  modified_base 9: mod_base = OTHER; note = 2'-deoxy-2'-fluorocytidine-3'-phosphate
  modified_base 10: mod_base = OTHER; note = 2'-deoxy-2'-fluorouridine-3'-phosphate
  modified_base 11: mod_base = OTHER; note = 2'-deoxy-2'-fluorouridine-3'-phosphate
  modified_base 12: mod_base = OTHER; note = 2'-O-methyluridine-3'-phosphate
  modified_base 13: mod_base = OTHER; note = 2'-O-methylguanosine-3'-phosphate
  modified_base 14: mod_base = OTHER; note = 2'-O-methyladenosine-3'-phosphate
  modified_base 15: mod_base = OTHER; note = 2'-O-methyluridine-3'-phosphate
  modified_base 16: mod_base = OTHER; note = 2'-O-methylguanosine-3'-phosphate
  modified_base 17: mod_base = OTHER; note = 2'-O-methyluridine-3'-phosphate
  modified_base 18: mod_base = OTHER; note = 2'-O-methyluridine-3'-phosphate
  modified_base 19: mod_base = OTHER; note = 2'-O-methyluridine-3'-phosphate
  modified_base 20: mod_base = OTHER; note = 2'-O-methylcytidine-3'-phosphate
  modified_base 21: mod_base = OTHER; note = 2'-O-methyladenosine-3'-phosphate ((2S,4R)-1-[29-[[2-(acetylamino)-2-deoxy-beta-D-galactopyra nosyl]oxy]-14,14-bis[[3-[[3-[[5-[[2-(acetylamino)-2-deoxy-b eta-D-galactopyranosyl]oxy]-1-oxopentyl]amino]propyl]amino] -3-oxopropoxy]methyl]-1,12,19,25-tetraoxo-16-oxa-13,20,24-t riazanonacos-1-yl]-4-hydroxy-2-pyrrolidinyl)methyl ester
cgaccaaactttgatgtttca

SEQ ID NO: 247 - RNA, 21 nt, synthetic construct
  source 1..21: mol_type = other RNA
  modified_base 1: mod_base = OTHER; note = 2'-O-methyluridine-3'-phosphorothioate
  modified_base 2: mod_base = OTHER; note = 2'-O-methylcytidine-3'-phosphorothioate
  modified_base 3: mod_base = OTHER; note = 2'-O-methyluridine-3'-phosphate
  modified_base 4: mod_base = OTHER; note = 2'-O-methyluridine-3'-phosphate
  modified_base 5: mod_base = OTHER; note = 2'-O-methyluridine-3'-phosphate
  modified_base 6: mod_base = OTHER; note = 2'-O-methyluridine-3'-phosphate
  modified_base 7: mod_base = OTHER; note = 2'-deoxy-2'-fluorocytidine-3'-phosphate
  modified_base 8: mod_base = OTHER; note = 2'-O-methyluridine-3'-phosphate
  modified_base 9: mod_base = OTHER; note = 2'-deoxy-2'-fluoroadenosine-3'-phosphate
  modified_base 10: mod_base = OTHER; note = 2'-deoxy-2'-fluoroadenosine-3'-phosphate
  modified_base 11: mod_base = OTHER; note = 2'-deoxy-2'-fluoroguanosine-3'-phosphate
  modified_base 12: mod_base = OTHER; note = 2'-O-methylguanosine-3'-phosphate
  modified_base 13: mod_base = OTHER; note = 2'-O-methyladenosine-3'-phosphate
  modified_base 14: mod_base = OTHER; note = 2'-O-methyluridine-3'-phosphate
  modified_base 15: mod_base = OTHER; note = 2'-O-methylcytidine-3'-phosphate
  modified_base 16: mod_base = OTHER; note = 2'-O-methyladenosine-3'-phosphate
  modified_base 17: mod_base = OTHER; note = 2'-O-methyluridine-3'-phosphate
  modified_base 18: mod_base = OTHER; note = 2'-O-methylcytidine-3'-phosphate
  modified_base 19: mod_base = OTHER; note = 2'-O-methylcytidine-3'-phosphate
  modified_base 20: mod_base = OTHER; note = 2'-O-methylcytidine-3'-phosphate
  modified_base 21: mod_base = OTHER; note = 2'-O-methyladenosine-3'-phosphate ((2S,4R)-1-[29-[[2-(acetylamino)-2-deoxy-beta-D-galactopyra nosyl]oxy]-14,14-bis[[3-[[3-[[5-[[2-(acetylamino)-2-deoxy-b eta-D-galactopyranosyl]oxy]-1-oxopentyl]amino]propyl]amino] -3-oxopropoxy]methyl]-1,12,19,25-tetraoxo-16-oxa-13,20,24-t riazanonacos-1-yl]-4-hydroxy-2-pyrrolidinyl)methyl ester
tcttttctaaggatcatccca

SEQ ID NO: 248 - RNA, 21 nt, synthetic construct
  source 1..21: mol_type = other RNA
  modified_base 1: mod_base = OTHER; note = 2'-O-methylcytidine-3'-phosphorothioate
  modified_base 2: mod_base = OTHER; note = 2'-O-methyluridine-3'-phosphorothioate
  modified_base 3: mod_base = OTHER; note = 2'-O-methyluridine-3'-phosphate
  modified_base 4: mod_base = OTHER; note = 2'-O-methyluridine-3'-phosphate
  modified_base 5: mod_base = OTHER; note = 2'-O-methyluridine-3'-phosphate
  modified_base 6: mod_base = OTHER; note = 2'-O-methylcytidine-3'-phosphate
  modified_base 7: mod_base = OTHER; note = 2'-deoxy-2'-fluorouridine-3'-phosphate
  modified_base 8: mod_base = OTHER; note = 2'-O-methyladenosine-3'-phosphate
  modified_base 9: mod_base = OTHER; note = 2'-deoxy-2'-fluoroadenosine-3'-phosphate
  modified_base 10: mod_base = OTHER; note = 2'-deoxy-2'-fluoroguanosine-3'-phosphate
  modified_base 11: mod_base = OTHER; note = 2'-deoxy-2'-fluoroguanosine-3'-phosphate
  modified_base 12: mod_base = OTHER; note = 2'-O-methyladenosine-3'-phosphate
  modified_base 13: mod_base = OTHER; note = 2'-O-methyluridine-3'-phosphate
  modified_base 14: mod_base = OTHER; note = 2'-O-methylcytidine-3'-phosphate
  modified_base 15: mod_base = OTHER; note = 2'-O-methyladenosine-3'-phosphate
  modified_base 16: mod_base = OTHER; note = 2'-O-methyluridine-3'-phosphate
  modified_base 17: mod_base = OTHER; note = 2'-O-methylcytidine-3'-phosphate
  modified_base 18: mod_base = OTHER; note = 2'-O-methylcytidine-3'-phosphate
  modified_base 19: mod_base = OTHER; note = 2'-O-methylcytidine-3'-phosphate
  modified_base 20: mod_base = OTHER; note = 2'-O-methyladenosine-3'-phosphate
  modified_base 21: mod_base = OTHER; note = 2'-O-methyladenosine-3'-phosphate ((2S,4R)-1-[29-[[2-(acetylamino)-2-deoxy-beta-D-galactopyra nosyl]oxy]-14,14-bis[[3-[[3-[[5-[[2-(acetylamino)-2-deoxy-b eta-D-galactopyranosyl]oxy]-1-oxopentyl]amino]propyl]amino] -3-oxopropoxy]methyl]-1,12,19,25-tetraoxo-16-oxa-13,20,24-t riazanonacos-1-yl]-4-hydroxy-2-pyrrolidinyl)methyl ester
cttttctaaggatcatcccaa

SEQ ID NO: 249 - RNA, 21 nt, synthetic construct
  source 1..21: mol_type = other RNA
  modified_base 1: mod_base = OTHER; note = 2'-O-methyladenosine-3'-phosphorothioate
  modified_base 2: mod_base = OTHER; note = 2'-O-methylguanosine-3'-phosphorothioate
  modified_base 3: mod_base = OTHER; note = 2'-O-methylguanosine-3'-phosphate
  modified_base 4: mod_base = OTHER; note = 2'-O-methyladenosine-3'-phosphate
  modified_base 5: mod_base = OTHER; note = 2'-O-methyladenosine-3'-phosphate
  modified_base 6: mod_base = OTHER; note = 2'-O-methyluridine-3'-phosphate
  modified_base 7: mod_base = OTHER; note = 2'-deoxy-2'-fluoroguanosine-3'-phosphate
  modified_base 8: mod_base = OTHER; note = 2'-O-methylcytidine-3'-phosphate
  modified_base 9: mod_base = OTHER; note = 2'-deoxy-2'-fluorocytidine-3'-phosphate
  modified_base 10: mod_base = OTHER; note = 2'-deoxy-2'-fluorouridine-3'-phosphate
  modified_base 11: mod_base = OTHER; note = 2'-deoxy-2'-fluorouridine-3'-phosphate
  modified_base 12: mod_base = OTHER; note = 2'-O-methyladenosine-3'-phosphate
  modified_base 13: mod_base = OTHER; note = 2'-O-methyluridine-3'-phosphate
  modified_base 14: mod_base = OTHER; note = 2'-O-methyladenosine-3'-phosphate
  modified_base 15: mod_base = OTHER; note = 2'-O-methyluridine-3'-phosphate
  modified_base 16: mod_base = OTHER; note = 2'-O-methylcytidine-3'-phosphate
  modified_base 17: mod_base = OTHER; note = 2'-O-methyladenosine-3'-phosphate
  modified_base 18: mod_base = OTHER; note = 2'-O-methylcytidine-3'-phosphate
  modified_base 19: mod_base = OTHER; note = 2'-O-methylguanosine-3'-phosphate
  modified_base 20: mod_base = OTHER; note = 2'-O-methyluridine-3'-phosphate
  modified_base 21: mod_base = OTHER; note = 2'-O-methyladenosine-3'-phosphate ((2S,4R)-1-[29-[[2-(acetylamino)-2-deoxy-beta-D-galactopyra nosyl]oxy]-14,14-bis[[3-[[3-[[5-[[2-(acetylamino)-2-deoxy-b eta-D-galactopyranosyl]oxy]-1-oxopentyl]amino]propyl]amino] -3-oxopropoxy]methyl]-1,12,19,25-tetraoxo-16-oxa-13,20,24-t riazanonacos-1-yl]-4-hydroxy-2-pyrrolidinyl)methyl ester
aggaatgccttatatcacgta

SEQ ID NO: 250 - RNA, 21 nt, synthetic construct
  source 1..21: mol_type = other RNA
  modified_base 1: mod_base = OTHER; note = 2'-O-methylguanosine-3'-phosphorothioate
  modified_base 2: mod_base = OTHER; note = 2'-O-methylguanosine-3'-phosphorothioate
  modified_base 3: mod_base = OTHER; note = 2'-O-methyladenosine-3'-phosphate
  modified_base 4: mod_base = OTHER; note = 2'-O-methyladenosine-3'-phosphate
  modified_base 5: mod_base = OTHER; note = 2'-O-methyluridine-3'-phosphate
  modified_base 6: mod_base = OTHER; note = 2'-O-methylguanosine-3'-phosphate
  modified_base 7: mod_base = OTHER; note = 2'-deoxy-2'-fluorocytidine-3'-phosphate
  modified_base 8: mod_base = OTHER; note = 2'-O-methylcytidine-3'-phosphate
  modified_base 9: mod_base = OTHER; note = 2'-deoxy-2'-fluorouridine-3'-phosphate
  modified_base 10: mod_base = OTHER; note = 2'-deoxy-2'-fluorouridine-3'-phosphate
  modified_base 11: mod_base = OTHER; note = 2'-deoxy-2'-fluoroadenosine-3'-phosphate
  modified_base 12: mod_base = OTHER; note = 2'-O-methyluridine-3'-phosphate
  modified_base 13: mod_base = OTHER; note = 2'-O-methyladenosine-3'-phosphate
  modified_base 14: mod_base = OTHER; note = 2'-O-methyluridine-3'-phosphate
  modified_base 15: mod_base = OTHER; note = 2'-O-methylcytidine-3'-phosphate
  modified_base 16: mod_base = OTHER; note = 2'-O-methyladenosine-3'-phosphate
  modified_base 17: mod_base = OTHER; note = 2'-O-methylcytidine-3'-phosphate
  modified_base 18: mod_base = OTHER; note = 2'-O-methylguanosine-3'-phosphate
  modified_base 19: mod_base = OTHER; note = 2'-O-methyluridine-3'-phosphate
  modified_base 20: mod_base = OTHER; note = 2'-O-methylcytidine-3'-phosphate
  modified_base 21: mod_base = OTHER; note = 2'-O-methyladenosine-3'-phosphate ((2S,4R)-1-[29-[[2-(acetylamino)-2-deoxy-beta-D-galactopyra nosyl]oxy]-14,14-bis[[3-[[3-[[5-[[2-(acetylamino)-2-deoxy-b eta-D-galactopyranosyl]oxy]-1-oxopentyl]amino]propyl]amino] -3-oxopropoxy]methyl]-1,12,19,25-tetraoxo-16-oxa-13,20,24-t riazanonacos-1-yl]-4-hydroxy-2-pyrrolidinyl)methyl ester
ggaatgccttatatcacgtca

SEQ ID NO: 251 - RNA, 21 nt, synthetic construct
  source 1..21: mol_type = other RNA
  modified_base 1: mod_base = OTHER; note = 2'-O-methyladenosine-3'-phosphorothioate
  modified_base 2: mod_base = OTHER; note = 2'-O-methyladenosine-3'-phosphorothioate
  modified_base 3: mod_base = OTHER; note = 2'-O-methyluridine-3'-phosphate
  modified_base 4: mod_base = OTHER; note = 2'-O-methylguanosine-3'-phosphate
  modified_base 5: mod_base = OTHER; note = 2'-O-methylcytidine-3'-phosphate
  modified_base 6: mod_base = OTHER; note = 2'-O-methylcytidine-3'-phosphate
  modified_base 7: mod_base = OTHER; note = 2'-deoxy-2'-fluorouridine-3'-phosphate
  modified_base 8: mod_base = OTHER; note = 2'-O-methyluridine-3'-phosphate
  modified_base 9: mod_base = OTHER; note = 2'-deoxy-2'-fluoroadenosine-3'-phosphate
  modified_base 10: mod_base = OTHER; note = 2'-deoxy-2'-fluorouridine-3'-phosphate
  modified_base 11: mod_base = OTHER; note = 2'-deoxy-2'-fluoroadenosine-3'-phosphate
  modified_base 12: mod_base = OTHER; note = 2'-O-methyluridine-3'-phosphate
  modified_base 13: mod_base = OTHER; note = 2'-O-methylcytidine-3'-phosphate
  modified_base 14: mod_base = OTHER; note = 2'-O-methyladenosine-3'-phosphate
  modified_base 15: mod_base = OTHER; note = 2'-O-methylcytidine-3'-phosphate
  modified_base 16: mod_base = OTHER; note = 2'-O-methylguanosine-3'-phosphate
  modified_base 17: mod_base = OTHER; note = 2'-O-methyluridine-3'-phosphate
  modified_base 18: mod_base = OTHER; note = 2'-O-methylcytidine-3'-phosphate
  modified_base 19: mod_base = OTHER; note = 2'-O-methylcytidine-3'-phosphate
  modified_base 20: mod_base = OTHER; note = 2'-O-methyladenosine-3'-phosphate
  modified_base 21: mod_base = OTHER; note = 2'-O-methyladenosine-3'-phosphate ((2S,4R)-1-[29-[[2-(acetylamino)-2-deoxy-beta-D-galactopyra nosyl]oxy]-14,14-bis[[3-[[3-[[5-[[2-(acetylamino)-2-deoxy-b eta-D-galactopyranosyl]oxy]-1-oxopentyl]amino]propyl]amino] -3-oxopropoxy]methyl]-1,12,19,25-tetraoxo-16-oxa-13,20,24-t riazanonacos-1-yl]-4-hydroxy-2-pyrrolidinyl)methyl ester
aatgccttatatcacgtccaa

SEQ ID NO: 252 - RNA, 21 nt, synthetic construct
  source 1..21: mol_type = other RNA
  modified_base 1: mod_base = OTHER; note = 2'-O-methyladenosine-3'-phosphorothioate
  modified_base 2: mod_base = OTHER; note = 2'-O-methyluridine-3'-phosphorothioate
  modified_base 3: mod_base = OTHER; note = 2'-O-methylguanosine-3'-phosphate
  modified_base 4: mod_base = OTHER; note = 2'-O-methylcytidine-3'-phosphate
  modified_base 5: mod_base = OTHER; note = 2'-O-methylcytidine-3'-phosphate
  modified_base 6: mod_base = OTHER; note = 2'-O-methyluridine-3'-phosphate
  modified_base 7: mod_base = OTHER; note = 2'-deoxy-2'-fluorouridine-3'-phosphate
  modified_base 8: mod_base = OTHER; note = 2'-O-methyladenosine-3'-phosphate
  modified_base 9: mod_base = OTHER; note = 2'-deoxy-2'-fluorouridine-3'-phosphate
  modified_base 10: mod_base = OTHER; note = 2'-deoxy-2'-fluoroadenosine-3'-phosphate
  modified_base 11: mod_base = OTHER; note = 2'-deoxy-2'-fluorouridine-3'-phosphate
  modified_base 12: mod_base = OTHER; note = 2'-O-methylcytidine-3'-phosphate
  modified_base 13: mod_base = OTHER; note = 2'-O-methyladenosine-3'-phosphate
  modified_base 14: mod_base = OTHER; note = 2'-O-methylcytidine-3'-phosphate
  modified_base 15: mod_base = OTHER; note = 2'-O-methylguanosine-3'-phosphate
  modified_base 16: mod_base = OTHER; note = 2'-O-methyluridine-3'-phosphate
  modified_base 17: mod_base = OTHER; note = 2'-O-methylcytidine-3'-phosphate
  modified_base 18: mod_base = OTHER; note = 2'-O-methylcytidine-3'-phosphate
  modified_base 19: mod_base = OTHER; note = 2'-O-methyladenosine-3'-phosphate
  modified_base 20: mod_base = OTHER; note = 2'-O-methyluridine-3'-phosphate
  modified_base 21: mod_base = OTHER; note = 2'-O-methyladenosine-3'-phosphate ((2S,4R)-1-[29-[[2-(acetylamino)-2-deoxy-beta-D-galactopyra nosyl]oxy]-14,14-bis[[3-[[3-[[5-[[2-(acetylamino)-2-deoxy-b eta-D-galactopyranosyl]oxy]-1-oxopentyl]amino]propyl]amino] -3-oxopropoxy]methyl]-1,12,19,25-tetraoxo-16-oxa-13,20,24-t riazanonacos-1-yl]-4-hydroxy-2-pyrrolidinyl)methyl ester
atgccttatatcacgtccata

SEQ ID NO: 253 - RNA, 21 nt, synthetic construct
  source 1..21: mol_type = other RNA
  modified_base 1: mod_base = OTHER; note = 2'-O-methyluridine-3'-phosphorothioate
  modified_base 2: mod_base = OTHER; note = 2'-O-methylguanosine-3'-phosphorothioate
  modified_base 3: mod_base = OTHER; note = 2'-O-methylcytidine-3'-phosphate
  modified_base 4: mod_base = OTHER; note = 2'-O-methylcytidine-3'-phosphate
  modified_base 5: mod_base = OTHER; note = 2'-O-methyluridine-3'-phosphate
  modified_base 6: mod_base = OTHER; note = 2'-O-methyluridine-3'-phosphate
  modified_base 7: mod_base = OTHER; note = 2'-deoxy-2'-fluoroadenosine-3'-phosphate
  modified_base 8: mod_base = OTHER; note = 2'-O-methyluridine-3'-phosphate
  modified_base 9: mod_base = OTHER; note = 2'-deoxy-2'-fluoroadenosine-3'-phosphate
  modified_base 10: mod_base = OTHER; note = 2'-deoxy-2'-fluorouridine-3'-phosphate
  modified_base 11: mod_base = OTHER; note = 2'-deoxy-2'-fluorocytidine-3'-phosphate
  modified_base 12: mod_base = OTHER; note = 2'-O-methyladenosine-3'-phosphate
  modified_base 13: mod_base = OTHER; note = 2'-O-methylcytidine-3'-phosphate
  modified_base 14: mod_base = OTHER; note = 2'-O-methylguanosine-3'-phosphate
  modified_base 15: mod_base = OTHER; note = 2'-O-methyluridine-3'-phosphate
  modified_base 16: mod_base = OTHER; note = 2'-O-methylcytidine-3'-phosphate
  modified_base 17: mod_base = OTHER; note = 2'-O-methylcytidine-3'-phosphate
  modified_base 18: mod_base = OTHER; note = 2'-O-methyladenosine-3'-phosphate
  modified_base 19: mod_base = OTHER; note = 2'-O-methyluridine-3'-phosphate
  modified_base 20: mod_base = OTHER; note = 2'-O-methyladenosine-3'-phosphate
  modified_base 21: mod_base = OTHER; note = 2'-O-methyladenosine-3'-phosphate ((2S,4R)-1-[29-[[2-(acetylamino)-2-deoxy-beta-D-galactopyra nosyl]oxy]-14,14-bis[[3-[[3-[[5-[[2-(acetylamino)-2-deoxy-b eta-D-galactopyranosyl]oxy]-1-oxopentyl]amino]propyl]amino] -3-oxopropoxy]methyl]-1,12,19,25-tetraoxo-16-oxa-13,20,24-t riazanonacos-1-yl]-4-hydroxy-2-pyrrolidinyl)methyl ester
tgccttatatcacgtccataa

SEQ ID NO: 254 - RNA, 21 nt, synthetic construct
  source 1..21: mol_type = other RNA
  modified_base 1: mod_base = OTHER; note = 2'-O-methylguanosine-3'-phosphorothioate
  modified_base 2: mod_base = OTHER; note = 2'-O-methylcytidine-3'-phosphorothioate
  modified_base 3: mod_base = OTHER; note = 2'-O-methylcytidine-3'-phosphate
  modified_base 4: mod_base = OTHER; note = 2'-O-methyluridine-3'-phosphate
  modified_base 5: mod_base = OTHER; note = 2'-O-methyluridine-3'-phosphate
  modified_base 6: mod_base = OTHER; note = 2'-O-methyladenosine-3'-phosphate
  modified_base 7: mod_base = OTHER; note = 2'-deoxy-2'-fluorouridine-3'-phosphate
  modified_base 8: mod_base = OTHER; note = 2'-O-methyladenosine-3'-phosphate
  modified_base 9: mod_base = OTHER; note = 2'-deoxy-2'-fluorouridine-3'-phosphate
  modified_base 10: mod_base = OTHER; note = 2'-deoxy-2'-fluorocytidine-3'-phosphate
  modified_base 11: mod_base = OTHER; note = 2'-deoxy-2'-fluoroadenosine-3'-phosphate
  modified_base 12: mod_base = OTHER; note = 2'-O-methylcytidine-3'-phosphate
  modified_base 13: mod_base = OTHER; note = 2'-O-methylguanosine-3'-phosphate
  modified_base 14: mod_base = OTHER; note = 2'-O-methyluridine-3'-phosphate
  modified_base 15: mod_base = OTHER; note = 2'-O-methylcytidine-3'-phosphate
  modified_base 16: mod_base = OTHER; note = 2'-O-methylcytidine-3'-phosphate
  modified_base 17: mod_base = OTHER; note = 2'-O-methyladenosine-3'-phosphate
  modified_base 18: mod_base = OTHER; note = 2'-O-methyluridine-3'-phosphate
  modified_base 19: mod_base = OTHER; note = 2'-O-methyladenosine-3'-phosphate
  modified_base 20: mod_base = OTHER; note = 2'-O-methyladenosine-3'-phosphate
  modified_base 21: mod_base = OTHER; note = 2'-O-methyladenosine-3'-phosphate ((2S,4R)-1-[29-[[2-(acetylamino)-2-deoxy-beta-D-galactopyra nosyl]oxy]-14,14-bis[[3-[[3-[[5-[[2-(acetylamino)-2-deoxy-b eta-D-galactopyranosyl]oxy]-1-oxopentyl]amino]propyl]amino] -3-oxopropoxy]methyl]-1,12,19,25-tetraoxo-16-oxa-13,20,24-t riazanonacos-1-yl]-4-hydroxy-2-pyrrolidinyl)methyl ester
gccttatatcacgtccataaa

SEQ ID NO: 255 - RNA, 21 nt, synthetic construct
  source 1..21: mol_type = other RNA
  modified_base 1: mod_base = OTHER; note = 2'-O-methylcytidine-3'-phosphorothioate
  modified_base 2: mod_base = OTHER; note = 2'-O-methyluridine-3'-phosphorothioate
  modified_base 3: mod_base = OTHER; note = 2'-O-methyluridine-3'-phosphate
  modified_base 4: mod_base = OTHER; note = 2'-O-methyladenosine-3'-phosphate
  modified_base 5: mod_base = OTHER; note = 2'-O-methyluridine-3'-phosphate
  modified_base 6: mod_base = OTHER; note = 2'-O-methyladenosine-3'-phosphate
  modified_base 7: mod_base = OTHER; note = 2'-deoxy-2'-fluorouridine-3'-phosphate
  modified_base 8: mod_base = OTHER; note = 2'-O-methylcytidine-3'-phosphate
  modified_base 9: mod_base = OTHER; note = 2'-deoxy-2'-fluoroadenosine-3'-phosphate
  modified_base 10: mod_base = OTHER; note = 2'-deoxy-2'-fluorocytidine-3'-phosphate
  modified_base 11: mod_base = OTHER; note = 2'-deoxy-2'-fluoroguanosine-3'-phosphate
  modified_base 12: mod_base = OTHER; note = 2'-O-methyluridine-3'-phosphate
  modified_base 13: mod_base = OTHER; note = 2'-O-methylcytidine-3'-phosphate
  modified_base 14: mod_base = OTHER; note = 2'-O-methylcytidine-3'-phosphate
  modified_base 15: mod_base = OTHER; note = 2'-O-methyladenosine-3'-phosphate
  modified_base 16: mod_base = OTHER; note = 2'-O-methyluridine-3'-phosphate
  modified_base 17: mod_base = OTHER; note = 2'-O-methyladenosine-3'-phosphate
  modified_base 18: mod_base = OTHER; note = 2'-O-methyladenosine-3'-phosphate
  modified_base 19: mod_base = OTHER; note = 2'-O-methylcytidine-3'-phosphate
  modified_base 20: mod_base = OTHER; note = 2'-O-methylguanosine-3'-phosphate
  modified_base 21: mod_base = OTHER; note = 2'-O-methyladenosine-3'-phosphate ((2S,4R)-1-[29-[[2-(acetylamino)-2-deoxy-beta-D-galactopyra nosyl]oxy]-14,14-bis[[3-[[3-[[5-[[2-(acetylamino)-2-deoxy-b eta-D-galactopyranosyl]oxy]-1-oxopentyl]amino]propyl]amino] -3-oxopropoxy]methyl]-1,12,19,25-tetraoxo-16-oxa-13,20,24-t riazanonacos-1-yl]-4-hydroxy-2-pyrrolidinyl)methyl ester
cttatatcacgtccataacga

SEQ ID NO: 256 - RNA, 21 nt, synthetic construct
  source 1..21: mol_type = other RNA
  modified_base 1: mod_base = OTHER; note = 2'-O-methyluridine-3'-phosphorothioate
  modified_base 2: mod_base = OTHER; note = 2'-O-methyluridine-3'-phosphorothioate
  modified_base 3: mod_base = OTHER; note = 2'-O-methyladenosine-3'-phosphate
  modified_base 4: mod_base = OTHER; note = 2'-O-methyluridine-3'-phosphate
  modified_base 5: mod_base = OTHER; note = 2'-O-methyladenosine-3'-phosphate
  modified_base 6: mod_base = OTHER; note = 2'-O-methyluridine-3'-phosphate
  modified_base 7: mod_base = OTHER; note = 2'-deoxy-2'-fluorocytidine-3'-phosphate
  modified_base 8: mod_base = OTHER; note = 2'-O-methyladenosine-3'-phosphate
  modified_base 9: mod_base = OTHER; note = 2'-deoxy-2'-fluorocytidine-3'-phosphate
  modified_base 10: mod_base = OTHER; note = 2'-deoxy-2'-fluoroguanosine-3'-phosphate
  modified_base 11: mod_base = OTHER; note = 2'-deoxy-2'-fluorouridine-3'-phosphate
  modified_base 12: mod_base = OTHER; note = 2'-O-methylcytidine-3'-phosphate
  modified_base 13: mod_base = OTHER; note = 2'-O-methylcytidine-3'-phosphate
  modified_base 14: mod_base = OTHER; note = 2'-O-methyladenosine-3'-phosphate
  modified_base 15: mod_base = OTHER; note = 2'-O-methyluridine-3'-phosphate
  modified_base 16: mod_base = OTHER; note = 2'-O-methyladenosine-3'-phosphate
  modified_base 17: mod_base = OTHER; note = 2'-O-methyladenosine-3'-phosphate
  modified_base 18: mod_base = OTHER; note = 2'-O-methylcytidine-3'-phosphate
  modified_base 19: mod_base = OTHER; note = 2'-O-methylguanosine-3'-phosphate
  modified_base 20: mod_base = OTHER; note = 2'-O-methylguanosine-3'-phosphate
  modified_base 21: mod_base = OTHER; note = 2'-O-methyladenosine-3'-phosphate ((2S,4R)-1-[29-[[2-(acetylamino)-2-deoxy-beta-D-galactopyra nosyl]oxy]-14,14-bis[[3-[[3-[[5-[[2-(acetylamino)-2-deoxy-b eta-D-galactopyranosyl]oxy]-1-oxopentyl]amino]propyl]amino] -3-oxopropoxy]methyl]-1,12,19,25-tetraoxo-16-oxa-13,20,24-t riazanonacos-1-yl]-4-hydroxy-2-pyrrolidinyl)methyl ester
ttatatcacgtccataacgga

SEQ ID NO: 257 - RNA, 21 nt, synthetic construct
  source 1..21: mol_type = other RNA
  modified_base 1: mod_base = OTHER; note = 2'-O-methyladenosine-3'-phosphorothioate
  modified_base 2: mod_base = OTHER; note = 2'-O-methyladenosine-3'-phosphorothioate
  modified_base 3: mod_base = OTHER; note = 2'-O-methyladenosine-3'-phosphate
  modified_base 4: mod_base = OTHER; note = 2'-O-methylguanosine-3'-phosphate
  modified_base 5: mod_base = OTHER; note = 2'-O-methylcytidine-3'-phosphate
  modified_base 6: mod_base = OTHER; note = 2'-O-methyladenosine-3'-phosphate
  modified_base 7: mod_base = OTHER; note = 2'-deoxy-2'-fluorocytidine-3'-phosphate
  modified_base 8: mod_base = OTHER; note = 2'-O-methyladenosine-3'-phosphate
  modified_base 9: mod_base = OTHER; note = 2'-deoxy-2'-fluoroadenosine-3'-phosphate
  modified_base 10: mod_base = OTHER; note = 2'-deoxy-2'-fluoroguanosine-3'-phosphate
  modified_base 11: mod_base = OTHER; note = 2'-deoxy-2'-fluoroguanosine-3'-phosphate
  modified_base 12: mod_base = OTHER; note = 2'-O-methyladenosine-3'-phosphate
  modified_base 13: mod_base = OTHER; note = 2'-O-methyluridine-3'-phosphate
  modified_base 14: mod_base = OTHER; note = 2'-O-methyluridine-3'-phosphate
  modified_base 15: mod_base = OTHER; note = 2'-O-methylcytidine-3'-phosphate
  modified_base 16: mod_base = OTHER; note = 2'-O-methyluridine-3'-phosphate
  modified_base 17: mod_base = OTHER; note = 2'-O-methylcytidine-3'-phosphate
  modified_base 18: mod_base = OTHER; note = 2'-O-methylguanosine-3'-phosphate
  modified_base 19: mod_base = OTHER; note = 2'-O-methylcytidine-3'-phosphate
  modified_base 20: mod_base = OTHER; note = 2'-O-methyluridine-3'-phosphate
  modified_base 21: mod_base = OTHER; note = 2'-O-methyladenosine-3'-phosphate ((2S,4R)-1-[29-[[2-(acetylamino)-2-deoxy-beta-D-galactopyra nosyl]oxy]-14,14-bis[[3-[[3-[[5-[[2-(acetylamino)-2-deoxy-b eta-D-galactopyranosyl]oxy]-1-oxopentyl]amino]propyl]amino] -3-oxopropoxy]methyl]-1,12,19,25-tetraoxo-16-oxa-13,20,24-t riazanonacos-1-yl]-4-hydroxy-2-pyrrolidinyl)methyl ester
aaagcacaaggattctcgcta

SEQ ID NO: 258 - RNA, 21 nt, synthetic construct
  source 1..21: mol_type = other RNA
  modified_base 1: mod_base = OTHER; note = 2'-O-methyladenosine-3'-phosphorothioate
  modified_base 2: mod_base = OTHER; note = 2'-O-methyladenosine-3'-phosphorothioate
  modified_base 3: mod_base = OTHER; note = 2'-O-methyluridine-3'-phosphate
  modified_base 4: mod_base = OTHER; note = 2'-O-methyladenosine-3'-phosphate
  modified_base 5: mod_base = OTHER; note = 2'-O-methyluridine-3'-phosphate
  modified_base 6: mod_base = OTHER; note = 2'-O-methylguanosine-3'-phosphate
  modified_base 7: mod_base = OTHER; note = 2'-deoxy-2'-fluoroadenosine-3'-phosphate
  modified_base 8: mod_base = OTHER; note = 2'-O-methyluridine-3'-phosphate
  modified_base 9: mod_base = OTHER; note = 2'-deoxy-2'-fluorouridine-3'-phosphate
  modified_base 10: mod_base = OTHER; note = 2'-deoxy-2'-fluoroadenosine-3'-phosphate
  modified_base 11: mod_base = OTHER; note = 2'-deoxy-2'-fluorouridine-3'-phosphate
  modified_base 12: mod_base = OTHER; note = 2'-O-methylcytidine-3'-phosphate
  modified_base 13: mod_base = OTHER; note = 2'-O-methylguanosine-3'-phosphate
  modified_base 14: mod_base = OTHER; note = 2'-O-methylguanosine-3'-phosphate
  modified_base 15: mod_base = OTHER; note = 2'-O-methylguanosine-3'-phosphate
  modified_base 16: mod_base = OTHER; note = 2'-O-methyladenosine-3'-phosphate
  modified_base 17: mod_base = OTHER; note = 2'-O-methyladenosine-3'-phosphate
  modified_base 18: mod_base = OTHER; note = 2'-O-methyladenosine-3'-phosphate
  modified_base 19: mod_base = OTHER; note = 2'-O-methyluridine-3'-phosphate
  modified_base 20: mod_base = OTHER; note = 2'-O-methylguanosine-3'-phosphate
  modified_base 21: mod_base = OTHER; note = 2'-O-methyladenosine-3'-phosphate ((2S,4R)-1-[29-[[2-(acetylamino)-2-deoxy-beta-D-galactopyra nosyl]oxy]-14,14-bis[[3-[[3-[[5-[[2-(acetylamino)-2-deoxy-b eta-D-galactopyranosyl]oxy]-1-oxopentyl]amino]propyl]amino] -3-oxopropoxy]methyl]-1,12,19,25-tetraoxo-16-oxa-13,20,24-t riazanonacos-1-yl]-4-hydroxy-2-pyrrolidinyl)methyl ester
aatatgattatcgggaaatga

SEQ ID NO: 259 - RNA, 21 nt, synthetic construct
  source 1..21: mol_type = other RNA
  modified_base 1: mod_base = OTHER; note = 2'-O-methyladenosine-3'-phosphorothioate
  modified_base 2: mod_base = OTHER; note = 2'-O-methyluridine-3'-phosphorothioate
  modified_base 3: mod_base = OTHER; note = 2'-O-methyladenosine-3'-phosphate
  modified_base 4: mod_base = OTHER; note = 2'-O-methyluridine-3'-phosphate
  modified_base 5: mod_base = OTHER; note = 2'-O-methylguanosine-3'-phosphate
  modified_base 6: mod_base = OTHER; note = 2'-O-methyladenosine-3'-phosphate
  modified_base 7: mod_base = OTHER; note = 2'-deoxy-2'-fluorouridine-3'-phosphate
  modified_base 8: mod_base = OTHER; note = 2'-O-methyluridine-3'-phosphate
  modified_base 9: mod_base = OTHER; note = 2'-deoxy-2'-fluoroadenosine-3'-phosphate
  modified_base 10: mod_base = OTHER; note = 2'-deoxy-2'-fluorouridine-3'-phosphate
  modified_base 11: mod_base = OTHER; note = 2'-deoxy-2'-fluorocytidine-3'-phosphate
  modified_base 12: mod_base = OTHER; note = 2'-O-methylguanosine-3'-phosphate
  modified_base 13: mod_base = OTHER; note = 2'-O-methylguanosine-3'-phosphate
  modified_base 14: mod_base = OTHER; note = 2'-O-methylguanosine-3'-phosphate
  modified_base 15: mod_base = OTHER; note = 2'-O-methyladenosine-3'-phosphate
  modified_base 16: mod_base = OTHER; note = 2'-O-methyladenosine-3'-phosphate
  modified_base 17: mod_base = OTHER; note = 2'-O-methyladenosine-3'-phosphate
  modified_base 18: mod_base = OTHER; note = 2'-O-methyluridine-3'-phosphate
  modified_base 19: mod_base = OTHER; note = 2'-O-methylguanosine-3'-phosphate
  modified_base 20: mod_base = OTHER; note = 2'-O-methylcytidine-3'-phosphate
  modified_base 21: mod_base = OTHER; note = 2'-O-methyladenosine-3'-phosphate ((2S,4R)-1-[29-[[2-(acetylamino)-2-deoxy-beta-D-galactopyra nosyl]oxy]-14,14-bis[[3-[[3-[[5-[[2-(acetylamino)-2-deoxy-b eta-D-galactopyranosyl]oxy]-1-oxopentyl]amino]propyl]amino] -3-oxopropoxy]methyl]-1,12,19,25-tetraoxo-16-oxa-13,20,24-t riazanonacos-1-yl]-4-hydroxy-2-pyrrolidinyl)methyl ester
atatgattatcgggaaatgca

SEQ ID NO: 260 - RNA, 21 nt, synthetic construct
  source 1..21: mol_type = other RNA
  modified_base 1: mod_base = OTHER; note = 2'-O-methyluridine-3'-phosphorothioate
  modified_base 2: mod_base = OTHER; note = 2'-O-methylguanosine-3'-phosphorothioate
  modified_base 3: mod_base = OTHER; note = 2'-O-methyladenosine-3'-phosphate
  modified_base 4: mod_base = OTHER; note = 2'-O-methylguanosine-3'-phosphate
  modified_base 5: mod_base = OTHER; note = 2'-O-methyladenosine-3'-phosphate
  modified_base 6: mod_base = OTHER; note = 2'-O-methylguanosine-3'-phosphate
  modified_base 7: mod_base = OTHER; note = 2'-deoxy-2'-fluoroadenosine-3'-phosphate
  modified_base 8: mod_base = OTHER; note = 2'-O-methyluridine-3'-phosphate
  modified_base 9: mod_base = OTHER; note = 2'-deoxy-2'-fluorouridine-3'-phosphate
  modified_base 10: mod_base = OTHER; note = 2'-deoxy-2'-fluoroguanosine-3'-phosphate
  modified_base 11: mod_base = OTHER; note = 2'-deoxy-2'-fluorocytidine-3'-phosphate
  modified_base 12: mod_base = OTHER; note = 2'-O-methyluridine-3'-phosphate
  modified_base 13: mod_base = OTHER; note = 2'-O-methyladenosine-3'-phosphate
  modified_base 14: mod_base = OTHER; note = 2'-O-methyluridine-3'-phosphate
  modified_base 15: mod_base = OTHER; note = 2'-O-methyluridine-3'-phosphate
  modified_base 16: mod_base = OTHER; note = 2'-O-methyladenosine-3'-phosphate
  modified_base 17: mod_base = OTHER; note = 2'-O-methylcytidine-3'-phosphate
  modified_base 18: mod_base = OTHER; note = 2'-O-methyladenosine-3'-phosphate
  modified_base 19: mod_base = OTHER; note = 2'-O-methylguanosine-3'-phosphate
  modified_base 20: mod_base = OTHER; note = 2'-O-methyladenosine-3'-phosphate
  modified_base 21: mod_base = OTHER; note = 2'-O-methyladenosine-3'-phosphate ((2S,4R)-1-[29-[[2-(acetylamino)-2-deoxy-beta-D-galactopyra nosyl]oxy]-14,14-bis[[3-[[3-[[5-[[2-(acetylamino)-2-deoxy-b eta-D-galactopyranosyl]oxy]-1-oxopentyl]amino]propyl]amino] -3-oxopropoxy]methyl]-1,12,19,25-tetraoxo-16-oxa-13,20,24-t riazanonacos-1-yl]-4-hydroxy-2-pyrrolidinyl)methyl ester
tgagagattgctattacagaa

SEQ ID NO: 261 - RNA, 21 nt, synthetic construct
  source 1..21: mol_type = other RNA
  modified_base 1: mod_base = OTHER; note = 2'-O-methylguanosine-3'-phosphorothioate
  modified_base 2: mod_base = OTHER; note = 2'-O-methyladenosine-3'-phosphorothioate
  modified_base 3: mod_base = OTHER; note = 2'-O-methylguanosine-3'-phosphate
  modified_base 4: mod_base = OTHER; note = 2'-O-methyladenosine-3'-phosphate
  modified_base 5: mod_base = OTHER; note = 2'-O-methylguanosine-3'-phosphate
  modified_base 6: mod_base = OTHER; note = 2'-O-methyladenosine-3'-phosphate
  modified_base 7: mod_base = OTHER; note = 2'-deoxy-2'-fluorouridine-3'-phosphate
  modified_base 8: mod_base = OTHER; note = 2'-O-methyluridine-3'-phosphate
  modified_base 9: mod_base = OTHER; note = 2'-deoxy-2'-fluoroguanosine-3'-phosphate
  modified_base 10: mod_base = OTHER; note = 2'-deoxy-2'-fluorocytidine-3'-phosphate
  modified_base 11: mod_base = OTHER; note = 2'-deoxy-2'-fluorouridine-3'-phosphate
  modified_base 12: mod_base = OTHER; note = 2'-O-methyladenosine-3'-phosphate
  modified_base 13: mod_base = OTHER; note = 2'-O-methyluridine-3'-phosphate
  modified_base 14: mod_base = OTHER; note = 2'-O-methyluridine-3'-phosphate
  modified_base 15: mod_base = OTHER; note = 2'-O-methyladenosine-3'-phosphate
  modified_base 16: mod_base = OTHER; note = 2'-O-methylcytidine-3'-phosphate
  modified_base 17: mod_base = OTHER; note = 2'-O-methyladenosine-3'-phosphate
  modified_base 18: mod_base = OTHER; note = 2'-O-methylguanosine-3'-phosphate
  modified_base 19: mod_base = OTHER; note = 2'-O-methyladenosine-3'-phosphate
  modified_base 20: mod_base = OTHER; note = 2'-O-methyluridine-3'-phosphate
  modified_base 21: mod_base = OTHER; note = 2'-O-methyladenosine-3'-phosphate ((2S,4R)-1-[29-[[2-(acetylamino)-2-deoxy-beta-D-galactopyra nosyl]oxy]-14,14-bis[[3-[[3-[[5-[[2-(acetylamino)-2-deoxy-b eta-D-galactopyranosyl]oxy]-1-oxopentyl]amino]propyl]amino] -3-oxopropoxy]methyl]-1,12,19,25-tetraoxo-16-oxa-13,20,24-t riazanonacos-1-yl]-4-hydroxy-2-pyrrolidinyl)methyl ester
gagagattgctattacagata

SEQ ID NO: 262 - RNA, 21 nt, synthetic construct
  source 1..21: mol_type = other RNA
  modified_base 1: mod_base = OTHER; note = 2'-O-methylguanosine-3'-phosphorothioate
  modified_base 2: mod_base = OTHER; note = 2'-O-methylcytidine-3'-phosphorothioate
  modified_base 3: mod_base = OTHER; note = 2'-O-methyluridine-3'-phosphate
  modified_base 4: mod_base = OTHER; note = 2'-O-methyladenosine-3'-phosphate
  modified_base 5: mod_base = OTHER; note = 2'-O-methyluridine-3'-phosphate
  modified_base 6: mod_base = OTHER; note = 2'-O-methyluridine-3'-phosphate
  modified_base 7: mod_base = OTHER; note = 2'-deoxy-2'-fluoroadenosine-3'-phosphate
  modified_base 8: mod_base = OTHER; note = 2'-O-methylcytidine-3'-phosphate
  modified_base 9: mod_base = OTHER; note = 2'-deoxy-2'-fluoroadenosine-3'-phosphate
  modified_base 10: mod_base = OTHER; note = 2'-deoxy-2'-fluoroguanosine-3'-phosphate
  modified_base 11: mod_base = OTHER; note = 2'-deoxy-2'-fluoroadenosine-3'-phosphate
  modified_base 12: mod_base = OTHER; note = 2'-O-methyluridine-3'-phosphate
  modified_base 13: mod_base = OTHER; note = 2'-O-methyluridine-3'-phosphate
  modified_base 14: mod_base = OTHER; note = 2'-O-methylcytidine-3'-phosphate
  modified_base 15: mod_base = OTHER; note = 2'-O-methylcytidine-3'-phosphate
  modified_base 16: mod_base = OTHER; note = 2'-O-methyluridine-3'-phosphate
  modified_base 17: mod_base = OTHER; note = 2'-O-methyluridine-3'-phosphate
  modified_base 18: mod_base = OTHER; note = 2'-O-methylcytidine-3'-phosphate
  modified_base 19: mod_base = OTHER; note = 2'-O-methyluridine-3'-phosphate
  modified_base 20: mod_base = OTHER; note = 2'-O-methyladenosine-3'-phosphate
  modified_base 21: mod_base = OTHER; note = 2'-O-methyladenosine-3'-phosphate ((2S,4R)-1-[29-[[2-(acetylamino)-2-deoxy-beta-D-galactopyra nosyl]oxy]-14,14-bis[[3-[[3-[[5-[[2-(acetylamino)-2-deoxy-b eta-D-galactopyranosyl]oxy]-1-oxopentyl]amino]propyl]amino] -3-oxopropoxy]methyl]-1,12,19,25-tetraoxo-16-oxa-13,20,24-t riazanonacos-1-yl]-4-hydroxy-2-pyrrolidinyl)methyl ester
gctattacagattccttctaa

SEQ ID NO: 263 - RNA, 21 nt, synthetic construct
  source 1..21: mol_type = other RNA
  modified_base 1: mod_base = OTHER; note = 2'-O-methyluridine-3'-phosphorothioate
  modified_base 2: mod_base = OTHER; note = 2'-O-methyladenosine-3'-phosphorothioate
  modified_base 3: mod_base = OTHER; note = 2'-O-methylcytidine-3'-phosphate
  modified_base 4: mod_base = OTHER; note = 2'-O-methyladenosine-3'-phosphate
  modified_base 5: mod_base = OTHER; note = 2'-O-methylguanosine-3'-phosphate
  modified_base 6: mod_base = OTHER; note = 2'-O-methyladenosine-3'-phosphate
  modified_base 7: mod_base = OTHER; note = 2'-deoxy-2'-fluorouridine-3'-phosphate
  modified_base 8: mod_base = OTHER; note = 2'-O-methyluridine-3'-phosphate
  modified_base 9: mod_base = OTHER; note = 2'-deoxy-2'-fluorocytidine-3'-phosphate
  modified_base 10: mod_base = OTHER; note = 2'-deoxy-2'-fluorocytidine-3'-phosphate
  modified_base 11: mod_base = OTHER; note = 2'-deoxy-2'-fluorouridine-3'-phosphate
  modified_base 12: mod_base = OTHER; note = 2'-O-methyluridine-3'-phosphate
  modified_base 13: mod_base = OTHER; note = 2'-O-methylcytidine-3'-phosphate
  modified_base 14: mod_base = OTHER; note = 2'-O-methyluridine-3'-phosphate
  modified_base 15: mod_base = OTHER; note = 2'-O-methyladenosine-3'-phosphate
  modified_base 16: mod_base = OTHER; note = 2'-O-methylcytidine-3'-phosphate
  modified_base 17: mod_base = OTHER; note = 2'-O-methyladenosine-3'-phosphate
  modified_base 18: mod_base = OTHER; note = 2'-O-methyladenosine-3'-phosphate
  modified_base 19: mod_base = OTHER; note = 2'-O-methyluridine-3'-phosphate
  modified_base 20: mod_base = OTHER; note = 2'-O-methylcytidine-3'-phosphate
  modified_base 21: mod_base = OTHER; note = 2'-O-methyladenosine-3'-phosphate ((2S,4R)-1-[29-[[2-(acetylamino)-2-deoxy-beta-D-galactopyra nosyl]oxy]-14,14-bis[[3-[[3-[[5-[[2-(acetylamino)-2-deoxy-b eta-D-galactopyranosyl]oxy]-1-oxopentyl]amino]propyl]amino] -3-oxopropoxy]methyl]-1,12,19,25-tetraoxo-16-oxa-13,20,24-t riazanonacos-1-yl]-4-hydroxy-2-pyrrolidinyl)methyl ester
tacagattccttctacaatca

SEQ ID NO: 264 - RNA, 21 nt, synthetic construct
  source 1..21: mol_type = other RNA
  modified_base 1: mod_base = OTHER; note = 2'-O-methylguanosine-3'-phosphorothioate
  modified_base 2: mod_base = OTHER; note = 2'-O-methyladenosine-3'-phosphorothioate
  modified_base 3: mod_base = OTHER; note = 2'-O-methyluridine-3'-phosphate
  modified_base 4: mod_base = OTHER; note = 2'-O-methyluridine-3'-phosphate
  modified_base 5: mod_base = OTHER; note = 2'-O-methylcytidine-3'-phosphate
  modified_base 6: mod_base = OTHER; note = 2'-O-methylcytidine-3'-phosphate
  modified_base 7: mod_base = OTHER; note = 2'-deoxy-2'-fluorouridine-3'-phosphate
  modified_base 8: mod_base = OTHER; note = 2'-O-methyluridine-3'-phosphate
  modified_base 9: mod_base = OTHER; note = 2'-deoxy-2'-fluorocytidine-3'-phosphate
  modified_base 10: mod_base = OTHER; note = 2'-deoxy-2'-fluorouridine-3'-phosphate
  modified_base 11: mod_base = OTHER; note = 2'-deoxy-2'-fluoroadenosine-3'-phosphate
  modified_base 12: mod_base = OTHER; note = 2'-O-methylcytidine-3'-phosphate
  modified_base 13: mod_base = OTHER; note = 2'-O-methyladenosine-3'-phosphate
  modified_base 14: mod_base = OTHER; note = 2'-O-methyladenosine-3'-phosphate
  modified_base 15: mod_base = OTHER; note = 2'-O-methyluridine-3'-phosphate
  modified_base 16: mod_base = OTHER; note = 2'-O-methylcytidine-3'-phosphate
  modified_base 17: mod_base = OTHER; note = 2'-O-methyladenosine-3'-phosphate
  modified_base 18: mod_base = OTHER; note = 2'-O-methylguanosine-3'-phosphate
  modified_base 19: mod_base = OTHER; note = 2'-O-methylguanosine-3'-phosphate
  modified_base 20: mod_base = OTHER; note = 2'-O-methyluridine-3'-phosphate
  modified_base 21: mod_base = OTHER; note = 2'-O-methyladenosine-3'-phosphate ((2S,4R)-1-[29-[[2-(acetylamino)-2-deoxy-beta-D-galactopyra nosyl]oxy]-14,14-bis[[3-[[3-[[5-[[2-(acetylamino)-2-deoxy-b eta-D-galactopyranosyl]oxy]-1-oxopentyl]amino]propyl]amino] -3-oxopropoxy]methyl]-1,12,19,25-tetraoxo-16-oxa-13,20,24-t riazanonacos-1-yl]-4-hydroxy-2-pyrrolidinyl)methyl ester
gattccttctacaatcaggta

SEQ ID NO: 265 - RNA, 21 nt, synthetic construct
  source 1..21: mol_type = other RNA
  modified_base 1: mod_base = OTHER; note = 2'-O-methylcytidine-3'-phosphorothioate
  modified_base 2: mod_base = OTHER; note = 2'-O-methyluridine-3'-phosphorothioate
  modified_base 3: mod_base = OTHER; note = 2'-O-methyluridine-3'-phosphate
  modified_base 4: mod_base = OTHER; note = 2'-O-methylcytidine-3'-phosphate
  modified_base 5: mod_base = OTHER; note = 2'-O-methyluridine-3'-phosphate
  modified_base 6: mod_base = OTHER; note = 2'-O-methyladenosine-3'-phosphate
  modified_base 7: mod_base = OTHER; note = 2'-deoxy-2'-fluorocytidine-3'-phosphate
  modified_base 8: mod_base = OTHER; note = 2'-O-methyladenosine-3'-phosphate
  modified_base 9: mod_base = OTHER; note = 2'-deoxy-2'-fluoroadenosine-3'-phosphate
  modified_base 10: mod_base = OTHER; note = 2'-deoxy-2'-fluorouridine-3'-phosphate
  modified_base 11: mod_base = OTHER; note = 2'-deoxy-2'-fluorocytidine-3'-phosphate
  modified_base 12: mod_base = OTHER; note = 2'-O-methyladenosine-3'-phosphate
  modified_base 13: mod_base = OTHER; note = 2'-O-methylguanosine-3'-phosphate
  modified_base 14: mod_base = OTHER; note = 2'-O-methylguanosine-3'-phosphate
  modified_base 15: mod_base = OTHER; note = 2'-O-methyluridine-3'-phosphate
  modified_base 16: mod_base = OTHER; note = 2'-O-methylcytidine-3'-phosphate
  modified_base 17: mod_base = OTHER; note = 2'-O-methyluridine-3'-phosphate
  modified_base 18: mod_base = OTHER; note = 2'-O-methyladenosine-3'-phosphate
  modified_base 19: mod_base = OTHER; note = 2'-O-methyluridine-3'-phosphate
  modified_base 20: mod_base = OTHER; note = 2'-O-methyluridine-3'-phosphate
  modified_base 21: mod_base = OTHER; note = 2'-O-methyladenosine-3'-phosphate ((2S,4R)-1-[29-[[2-(acetylamino)-2-deoxy-beta-D-galactopyra nosyl]oxy]-14,14-bis[[3-[[3-[[5-[[2-(acetylamino)-2-deoxy-b eta-D-galactopyranosyl]oxy]-1-oxopentyl]amino]propyl]amino] -3-oxopropoxy]methyl]-1,12,19,25-tetraoxo-16-oxa-13,20,24-t riazanonacos-1-yl]-4-hydroxy-2-pyrrolidinyl)methyl ester
cttctacaatcaggtctatta

SEQ ID NO: 266 - RNA, 21 nt, synthetic construct
  source 1..21: mol_type = other RNA
  modified_base 1: mod_base = OTHER; note = 2'-O-methyluridine-3'-phosphorothioate
  modified_base 2: mod_base = OTHER; note = 2'-O-methyladenosine-3'-phosphorothioate
  modified_base 3: mod_base = OTHER; note = 2'-O-methylcytidine-3'-phosphate
  modified_base 4: mod_base = OTHER; note = 2'-O-methyladenosine-3'-phosphate
  modified_base 5: mod_base = OTHER; note = 2'-O-methyladenosine-3'-phosphate
  modified_base 6: mod_base = OTHER; note = 2'-O-methyluridine-3'-phosphate
  modified_base 7: mod_base = OTHER; note = 2'-deoxy-2'-fluorocytidine-3'-phosphate
  modified_base 8: mod_base = OTHER; note = 2'-O-methyladenosine-3'-phosphate
  modified_base 9: mod_base = OTHER; note = 2'-deoxy-2'-fluoroguanosine-3'-phosphate
  modified_base 10: mod_base = OTHER; note = 2'-deoxy-2'-fluoroguanosine-3'-phosphate
  modified_base 11: mod_base = OTHER; note = 2'-deoxy-2'-fluorouridine-3'-phosphate
  modified_base 12: mod_base = OTHER; note = 2'-O-methylcytidine-3'-phosphate
  modified_base 13: mod_base = OTHER; note = 2'-O-methyluridine-3'-phosphate
  modified_base 14: mod_base = OTHER; note = 2'-O-methyladenosine-3'-phosphate
  modified_base 15: mod_base = OTHER; note = 2'-O-methyluridine-3'-phosphate
  modified_base 16: mod_base = OTHER; note = 2'-O-methyluridine-3'-phosphate
  modified_base 17: mod_base = OTHER; note = 2'-O-methylcytidine-3'-phosphate
  modified_base 18: mod_base = OTHER; note = 2'-O-methyladenosine-3'-phosphate
  modified_base 19: mod_base = OTHER; note = 2'-O-methyluridine-3'-phosphate
  modified_base 20: mod_base = OTHER; note = 2'-O-methylcytidine-3'-phosphate
  modified_base 21: mod_base = OTHER; note = 2'-O-methyladenosine-3'-phosphate ((2S,4R)-1-[29-[[2-(acetylamino)-2-deoxy-beta-D-galactopyra nosyl]oxy]-14,14-bis[[3-[[3-[[5-[[2-(acetylamino)-2-deoxy-b eta-D-galactopyranosyl]oxy]-1-oxopentyl]amino]propyl]amino] -3-oxopropoxy]methyl]-1,12,19,25-tetraoxo-16-oxa-13,20,24-t riazanonacos-1-yl]-4-hydroxy-2-pyrrolidinyl)methyl ester
tacaatcaggtctattcatca

SEQ ID NO: 267 - RNA, 21 nt, synthetic construct
  source 1..21: mol_type = other RNA
  modified_base 1: mod_base = OTHER; note = 2'-O-methyladenosine-3'-phosphorothioate
  modified_base 2: mod_base = OTHER; note = 2'-O-methylguanosine-3'-phosphorothioate
  modified_base 3: mod_base = OTHER; note = 2'-O-methylguanosine-3'-phosphate
  modified_base 4: mod_base = OTHER; note = 2'-O-methyluridine-3'-phosphate
  modified_base 5: mod_base = OTHER; note = 2'-O-methylcytidine-3'-phosphate
  modified_base 6: mod_base = OTHER; note = 2'-O-methyluridine-3'-phosphate
  modified_base 7: mod_base = OTHER; note = 2'-deoxy-2'-fluoroadenosine-3'-phosphate
  modified_base 8: mod_base = OTHER; note = 2'-O-methyluridine-3'-phosphate
  modified_base 9: mod_base = OTHER; note = 2'-deoxy-2'-fluorouridine-3'-phosphate
  modified_base 10: mod_base = OTHER; note = 2'-deoxy-2'-fluorocytidine-3'-phosphate
  modified_base 11: mod_base = OTHER; note = 2'-deoxy-2'-fluoroadenosine-3'-phosphate
  modified_base 12: mod_base = OTHER; note = 2'-O-methyluridine-3'-phosphate
  modified_base 13: mod_base = OTHER; note = 2'-O-methylcytidine-3'-phosphate
  modified_base 14: mod_base = OTHER; note = 2'-O-methyladenosine-3'-phosphate
  modified_base 15: mod_base = OTHER; note = 2'-O-methylguanosine-3'-phosphate
  modified_base 16: mod_base = OTHER; note = 2'-O-methylguanosine-3'-phosphate
  modified_base 17: mod_base = OTHER; note = 2'-O-methyladenosine-3'-phosphate
  modified_base 18: mod_base = OTHER; note = 2'-O-methyluridine-3'-phosphate
  modified_base 19: mod_base = OTHER; note = 2'-O-methyladenosine-3'-phosphate
  modified_base 20: mod_base = OTHER; note = 2'-O-methyladenosine-3'-phosphate
  modified_base 21: mod_base = OTHER; note = 2'-O-methyladenosine-3'-phosphate ((2S,4R)-1-[29-[[2-(acetylamino)-2-deoxy-beta-D-galactopyra nosyl]oxy]-14,14-bis[[3-[[3-[[5-[[2-(acetylamino)-2-deoxy-b eta-D-galactopyranosyl]oxy]-1-oxopentyl]amino]propyl]amino] -3-oxopropoxy]methyl]-1,12,19,25-tetraoxo-16-oxa-13,20,24-t riazanonacos-1-yl]-4-hydroxy-2-pyrrolidinyl)methyl ester
aggtctattcatcaggataaa

SEQ ID NO: 268 - RNA, 21 nt, synthetic construct
  source 1..21: mol_type = other RNA
  modified_base 1: mod_base = OTHER; note = 2'-O-methyluridine-3'-phosphorothioate
  modified_base 2: mod_base = OTHER; note = 2'-O-methyluridine-3'-phosphorothioate
  modified_base 3: mod_base = OTHER; note = 2'-O-methylcytidine-3'-phosphate
  modified_base 4: mod_base = OTHER; note = 2'-O-methyluridine-3'-phosphate
  modified_base 5: mod_base = OTHER; note = 2'-O-methyluridine-3'-phosphate
  modified_base 6: mod_base = OTHER; note = 2'-O-methylcytidine-3'-phosphate
  modified_base 7: mod_base = OTHER; note = 2'-deoxy-2'-fluoroadenosine-3'-phosphate
  modified_base 8: mod_base = OTHER; note = 2'-O-methylguanosine-3'-phosphate
  modified_base 9: mod_base = OTHER; note = 2'-deoxy-2'-fluorouridine-3'-phosphate
  modified_base 10: mod_base = OTHER; note = 2'-deoxy-2'-fluorouridine-3'-phosphate
  modified_base 11: mod_base = OTHER; note = 2'-deoxy-2'-fluoroguanosine-3'-phosphate
  modified_base 12: mod_base = OTHER; note = 2'-O-methyladenosine-3'-phosphate
  modified_base 13: mod_base = OTHER; note = 2'-O-methylguanosine-3'-phosphate
  modified_base 14: mod_base = OTHER; note = 2'-O-methyladenosine-3'-phosphate
  modified_base 15: mod_base = OTHER; note = 2'-O-methyladenosine-3'-phosphate
  modified_base 16: mod_base = OTHER; note = 2'-O-methylguanosine-3'-phosphate
  modified_base 17: mod_base = OTHER; note = 2'-O-methyladenosine-3'-phosphate
  modified_base 18: mod_base = OTHER; note = 2'-O-methyluridine-3'-phosphate
  modified_base 19: mod_base = OTHER; note = 2'-O-methyluridine-3'-phosphate
  modified_base 20: mod_base = OTHER; note = 2'-O-methylguanosine-3'-phosphate
  modified_base 21: mod_base = OTHER; note = 2'-O-methyladenosine-3'-phosphate ((2S,4R)-1-[29-[[2-(acetylamino)-2-deoxy-beta-D-galactopyra nosyl]oxy]-14,14-bis[[3-[[3-[[5-[[2-(acetylamino)-2-deoxy-b eta-D-galactopyranosyl]oxy]-1-oxopentyl]amino]propyl]amino] -3-oxopropoxy]methyl]-1,12,19,25-tetraoxo-16-oxa-13,20,24-t riazanonacos-1-yl]-4-hydroxy-2-pyrrolidinyl)methyl ester
ttcttcagttgagaagattga

SEQ ID NO: 269 - RNA, 21 nt, synthetic construct
  source 1..21: mol_type = other RNA
  modified_base 1: mod_base = OTHER; note = 2'-O-methyluridine-3'-phosphorothioate
  modified_base 2: mod_base = OTHER; note = 2'-O-methylcytidine-3'-phosphorothioate
  modified_base 3: mod_base = OTHER; note = 2'-O-methyluridine-3'-phosphate
  modified_base 4: mod_base = OTHER; note = 2'-O-methyluridine-3'-phosphate
  modified_base 5: mod_base = OTHER; note = 2'-O-methylcytidine-3'-phosphate
  modified_base 6: mod_base = OTHER; note = 2'-O-methyladenosine-3'-phosphate
  modified_base 7: mod_base = OTHER; note = 2'-deoxy-2'-fluoroguanosine-3'-phosphate
  modified_base 8: mod_base = OTHER; note = 2'-O-methyluridine-3'-phosphate
  modified_base 9: mod_base = OTHER; note = 2'-deoxy-2'-fluorouridine-3'-phosphate
  modified_base 10: mod_base = OTHER; note = 2'-deoxy-2'-fluoroguanosine-3'-phosphate
  modified_base 11: mod_base = OTHER; note = 2'-deoxy-2'-fluoroadenosine-3'-phosphate
  modified_base 12: mod_base = OTHER; note = 2'-O-methylguanosine-3'-phosphate
  modified_base 13: mod_base = OTHER; note = 2'-O-methyladenosine-3'-phosphate
  modified_base 14: mod_base = OTHER; note = 2'-O-methyladenosine-3'-phosphate
  modified_base 15: mod_base = OTHER; note = 2'-O-methylguanosine-3'-phosphate
  modified_base 16: mod_base = OTHER; note = 2'-O-methyladenosine-3'-phosphate
  modified_base 17: mod_base = OTHER; note = 2'-O-methyluridine-3'-phosphate
  modified_base 18: mod_base = OTHER; note = 2'-O-methyluridine-3'-phosphate
  modified_base 19: mod_base = OTHER; note = 2'-O-methylguanosine-3'-phosphate
  modified_base 20: mod_base = OTHER; note = 2'-O-methyluridine-3'-phosphate
  modified_base 21: mod_base = OTHER; note = 2'-O-methyladenosine-3'-phosphate ((2S,4R)-1-[29-[[2-(acetylamino)-2-deoxy-beta-D-galactopyra nosyl]oxy]-14,14-bis[[3-[[3-[[5-[[2-(acetylamino)-2-deoxy-b eta-D-galactopyranosyl]oxy]-1-oxopentyl]amino]propyl]amino] -3-oxopropoxy]methyl]-1,12,19,25-tetraoxo-16-oxa-13,20,24-t riazanonacos-1-yl]-4-hydroxy-2-pyrrolidinyl)methyl ester
tcttcagttgagaagattgta

SEQ ID NO: 270 - RNA, 21 nt, synthetic construct
  source 1..21: mol_type = other RNA
  modified_base 1: mod_base = OTHER; note = 2'-O-methylcytidine-3'-phosphorothioate
  modified_base 2: mod_base = OTHER; note = 2'-O-methyladenosine-3'-phosphorothioate
  modified_base 3: mod_base = OTHER; note = 2'-O-methylguanosine-3'-phosphate
  modified_base 4: mod_base = OTHER; note = 2'-O-methyluridine-3'-phosphate
  modified_base 5: mod_base = OTHER; note = 2'-O-methyluridine-3'-phosphate
  modified_base 6: mod_base = OTHER; note = 2'-O-methylguanosine-3'-phosphate
  modified_base 7: mod_base = OTHER; note = 2'-deoxy-2'-fluoroadenosine-3'-phosphate
  modified_base 8: mod_base = OTHER; note = 2'-O-methylguanosine-3'-phosphate
  modified_base 9: mod_base = OTHER; note = 2'-deoxy-2'-fluoroadenosine-3'-phosphate
  modified_base 10: mod_base = OTHER; note = 2'-deoxy-2'-fluoroadenosine-3'-phosphate
  modified_base 11: mod_base = OTHER; note = 2'-deoxy-2'-fluoroguanosine-3'-phosphate
  modified_base 12: mod_base = OTHER; note = 2'-O-methyladenosine-3'-phosphate
  modified_base 13: mod_base = OTHER; note = 2'-O-methyluridine-3'-phosphate
  modified_base 14: mod_base = OTHER; note = 2'-O-methyluridine-3'-phosphate
  modified_base 15: mod_base = OTHER; note = 2'-O-methylguanosine-3'-phosphate
  modified_base 16: mod_base = OTHER; note = 2'-O-methyluridine-3'-phosphate
  modified_base 17: mod_base = OTHER; note = 2'-O-methyladenosine-3'-phosphate
  modified_base 18: mod_base = OTHER; note = 2'-O-methyluridine-3'-phosphate
  modified_base 19: mod_base = OTHER; note = 2'-O-methyluridine-3'-phosphate
  modified_base 20: mod_base = OTHER; note = 2'-O-methyladenosine-3'-phosphate
  modified_base 21: mod_base = OTHER; note = 2'-O-methyladenosine-3'-phosphate ((2S,4R)-1-[29-[[2-(acetylamino)-2-deoxy-beta-D-galactopyra nosyl]oxy]-14,14-bis[[3-[[3-[[5-[[2-(acetylamino)-2-deoxy-b eta-D-galactopyranosyl]oxy]-1-oxopentyl]amino]propyl]amino] -3-oxopropoxy]methyl]-1,12,19,25-tetraoxo-16-oxa-13,20,24-t riazanonacos-1-yl]-4-hydroxy-2-pyrrolidinyl)methyl ester
cagttgagaagattgtattaa

SEQ ID NO: 271 - RNA, 21 nt, synthetic construct
  source 1..21: mol_type = other RNA
  modified_base 1: mod_base = OTHER; note = 2'-O-methylguanosine-3'-phosphorothioate
  modified_base 2: mod_base = OTHER; note = 2'-O-methyluridine-3'-phosphorothioate
  modified_base 3: mod_base = OTHER; note = 2'-O-methyluridine-3'-phosphate
  modified_base 4: mod_base = OTHER; note = 2'-O-methylguanosine-3'-phosphate
  modified_base 5: mod_base = OTHER; note = 2'-O-methyladenosine-3'-phosphate
  modified_base 6: mod_base = OTHER; note = 2'-O-methylguanosine-3'-phosphate
  modified_base 7: mod_base = OTHER; note = 2'-deoxy-2'-fluoroadenosine-3'-phosphate
  modified_base 8: mod_base = OTHER; note = 2'-O-methyladenosine-3'-phosphate
  modified_base 9: mod_base = OTHER; note = 2'-deoxy-2'-fluoroguanosine-3'-phosphate
  modified_base 10: mod_base = OTHER; note = 2'-deoxy-2'-fluoroadenosine-3'-phosphate
  modified_base 11: mod_base = OTHER; note = 2'-deoxy-2'-fluorouridine-3'-phosphate
  modified_base 12: mod_base = OTHER; note = 2'-O-methyluridine-3'-phosphate
  modified_base 13: mod_base = OTHER; note = 2'-O-methylguanosine-3'-phosphate
  modified_base 14: mod_base = OTHER; note = 2'-O-methyluridine-3'-phosphate
  modified_base 15: mod_base = OTHER; note = 2'-O-methyladenosine-3'-phosphate
  modified_base 16: mod_base = OTHER; note = 2'-O-methyluridine-3'-phosphate
  modified_base 17: mod_base = OTHER; note = 2'-O-methyluridine-3'-phosphate
  modified_base 18: mod_base = OTHER; note = 2'-O-methyladenosine-3'-phosphate
  modified_base 19: mod_base = OTHER; note = 2'-O-methyladenosine-3'-phosphate
  modified_base 20: mod_base = OTHER; note = 2'-O-methylcytidine-3'-phosphate
  modified_base 21: mod_base = OTHER; note = 2'-O-methyladenosine-3'-phosphate ((2S,4R)-1-[29-[[2-(acetylamino)-2-deoxy-beta-D-galactopyra nosyl]oxy]-14,14-bis[[3-[[3-[[5-[[2-(acetylamino)-2-deoxy-b eta-D-galactopyranosyl]oxy]-1-oxopentyl]amino]propyl]amino] -3-oxopropoxy]methyl]-1,12,19,25-tetraoxo-16-oxa-13,20,24-t riazanonacos-1-yl]-4-hydroxy-2-pyrrolidinyl)methyl ester
gttgagaagattgtattaaca

SEQ ID NO: 272 - RNA, 21 nt, synthetic construct
  source 1..21: mol_type = other RNA
  modified_base 1: mod_base = OTHER; note = 2'-O-methyladenosine-3'-phosphorothioate
  modified_base 2: mod_base = OTHER; note = 2'-O-methyladenosine-3'-phosphorothioate
  modified_base 3: mod_base = OTHER; note = 2'-O-methylguanosine-3'-phosphate
  modified_base 4: mod_base = OTHER; note = 2'-O-methyladenosine-3'-phosphate
  modified_base 5: mod_base = OTHER; note = 2'-O-methyluridine-3'-phosphate
  modified_base 6: mod_base = OTHER; note = 2'-O-methyluridine-3'-phosphate
  modified_base 7: mod_base = OTHER; note = 2'-deoxy-2'-fluoroguanosine-3'-phosphate
  modified_base 8: mod_base = OTHER; note = 2'-O-methyluridine-3'-phosphate
  modified_base 9: mod_base = OTHER; note = 2'-deoxy-2'-fluoroadenosine-3'-phosphate
  modified_base 10: mod_base = OTHER; note = 2'-deoxy-2'-fluorouridine-3'-phosphate
  modified_base 11: mod_base = OTHER; note = 2'-deoxy-2'-fluorouridine-3'-phosphate
  modified_base 12: mod_base = OTHER; note = 2'-O-methyladenosine-3'-phosphate
  modified_base 13: mod_base = OTHER; note = 2'-O-methyladenosine-3'-phosphate
  modified_base 14: mod_base = OTHER; note = 2'-O-methylcytidine-3'-phosphate
  modified_base 15: mod_base = OTHER; note = 2'-O-methyluridine-3'-phosphate
  modified_base 16: mod_base = OTHER; note = 2'-O-methyladenosine-3'-phosphate
  modified_base 17: mod_base = OTHER; note = 2'-O-methylcytidine-3'-phosphate
  modified_base 18: mod_base = OTHER; note = 2'-O-methyladenosine-3'-phosphate
  modified_base 19: mod_base = OTHER; note = 2'-O-methylcytidine-3'-phosphate
  modified_base 20: mod_base = OTHER; note = 2'-O-methyluridine-3'-phosphate
  modified_base 21: mod_base = OTHER; note = 2'-O-methyladenosine-3'-phosphate ((2S,4R)-1-[29-[[2-(acetylamino)-2-deoxy-beta-D-galactopyra nosyl]oxy]-14,14-bis[[3-[[3-[[5-[[2-(acetylamino)-2-deoxy-b eta-D-galactopyranosyl]oxy]-1-oxopentyl]amino]propyl]amino] -3-oxopropoxy]methyl]-1,12,19,25-tetraoxo-16-oxa-13,20,24-t riazanonacos-1-yl]-4-hydroxy-2-pyrrolidinyl)methyl ester
aagattgtattaactacacta

SEQ ID NO: 273 - RNA, 21 nt, synthetic construct
  source 1..21: mol_type = other RNA
  modified_base 1: mod_base = OTHER; note = 2'-O-methyluridine-3'-phosphorothioate
  modified_base 2: mod_base = OTHER; note = 2'-O-methyluridine-3'-phosphorothioate
  modified_base 3: mod_base = OTHER; note = 2'-O-methylguanosine-3'-phosphate
  modified_base 4: mod_base = OTHER; note = 2'-O-methyluridine-3'-phosphate
  modified_base 5: mod_base = OTHER; note = 2'-O-methyladenosine-3'-phosphate
  modified_base 6: mod_base = OTHER; note = 2'-O-methyluridine-3'-phosphate
  modified_base 7: mod_base = OTHER; note = 2'-deoxy-2'-fluorouridine-3'-phosphate
  modified_base 8: mod_base = OTHER; note = 2'-O-methyladenosine-3'-phosphate
  modified_base 9: mod_base = OTHER; note = 2'-deoxy-2'-fluoroadenosine-3'-phosphate
  modified_base 10: mod_base = OTHER; note = 2'-deoxy-2'-fluorocytidine-3'-phosphate
  modified_base 11: mod_base = OTHER; note = 2'-deoxy-2'-fluorouridine-3'-phosphate
  modified_base 12: mod_base = OTHER; note = 2'-O-methyladenosine-3'-phosphate
  modified_base 13: mod_base = OTHER; note = 2'-O-methylcytidine-3'-phosphate
  modified_base 14: mod_base = OTHER; note = 2'-O-methyladenosine-3'-phosphate
  modified_base 15: mod_base = OTHER; note = 2'-O-methylcytidine-3'-phosphate
  modified_base 16: mod_base = OTHER; note = 2'-O-methyluridine-3'-phosphate
  modified_base 17: mod_base = OTHER; note = 2'-O-methyladenosine-3'-phosphate
  modified_base 18: mod_base = OTHER; note = 2'-O-methylguanosine-3'-phosphate
  modified_base 19: mod_base = OTHER; note = 2'-O-methyladenosine-3'-phosphate
  modified_base 20: mod_base = OTHER; note = 2'-O-methylguanosine-3'-phosphate
  modified_base 21: mod_base = OTHER; note = 2'-O-methyladenosine-3'-phosphate ((2S,4R)-1-[29-[[2-(acetylamino)-2-deoxy-beta-D-galactopyra nosyl]oxy]-14,14-bis[[3-[[3-[[5-[[2-(acetylamino)-2-deoxy-b eta-D-galactopyranosyl]oxy]-1-oxopentyl]amino]propyl]amino] -3-oxopropoxy]methyl]-1,12,19,25-tetraoxo-16-oxa-13,20,24-t riazanonacos-1-yl]-4-hydroxy-2-pyrrolidinyl)methyl ester
ttgtattaactacactagaga

SEQ ID NO: 274 - RNA, 21 nt, synthetic construct
  source 1..21: mol_type = other RNA
  modified_base 1: mod_base = OTHER; note = 2'-O-methylguanosine-3'-phosphorothioate
  modified_base 2: mod_base = OTHER; note = 2'-O-methyluridine-3'-phosphorothioate
  modified_base 3: mod_base = OTHER; note = 2'-O-methyladenosine-3'-phosphate
  modified_base 4: mod_base = OTHER; note = 2'-O-methyluridine-3'-phosphate
  modified_base 5: mod_base = OTHER; note = 2'-O-methyluridine-3'-phosphate
  modified_base 6: mod_base = OTHER; note = 2'-O-methyladenosine-3'-phosphate
  modified_base 7: mod_base = OTHER; note = 2'-deoxy-2'-fluoroadenosine-3'-phosphate
  modified_base 8: mod_base = OTHER; note = 2'-O-methylcytidine-3'-phosphate
  modified_base 9: mod_base = OTHER; note = 2'-deoxy-2'-fluorouridine-3'-phosphate
  modified_base 10: mod_base = OTHER; note = 2'-deoxy-2'-fluoroadenosine-3'-phosphate
  modified_base 11: mod_base = OTHER; note = 2'-deoxy-2'-fluorocytidine-3'-phosphate
  modified_base 12: mod_base = OTHER; note = 2'-O-methyladenosine-3'-phosphate
  modified_base 13: mod_base = OTHER; note = 2'-O-methylcytidine-3'-phosphate
  modified_base 14: mod_base = OTHER; note = 2'-O-methyluridine-3'-phosphate
  modified_base 15: mod_base = OTHER; note = 2'-O-methyladenosine-3'-phosphate
  modified_base 16: mod_base = OTHER; note = 2'-O-methylguanosine-3'-phosphate
  modified_base 17: mod_base = OTHER; note = 2'-O-methyladenosine-3'-phosphate
  modified_base 18: mod_base = OTHER; note = 2'-O-methylguanosine-3'-phosphate
  modified_base 19: mod_base = OTHER; note = 2'-O-methyladenosine-3'-phosphate
  modified_base 20: mod_base = OTHER; note = 2'-O-methyluridine-3'-phosphate
  modified_base 21: mod_base = OTHER; note = 2'-O-methyladenosine-3'-phosphate ((2S,4R)-1-[29-[[2-(acetylamino)-2-deoxy-beta-D-galactopyra nosyl]oxy]-14,14-bis[[3-[[3-[[5-[[2-(acetylamino)-2-deoxy-b eta-D-galactopyranosyl]oxy]-1-oxopentyl]amino]propyl]amino] -3-oxopropoxy]methyl]-1,12,19,25-tetraoxo-16-oxa-13,20,24-t riazanonacos-1-yl]-4-hydroxy-2-pyrrolidinyl)methyl ester
gtattaactacactagagata

SEQ ID NO: 275 - RNA, 21 nt, synthetic construct
  source 1..21: mol_type = other RNA
  modified_base 1: mod_base = OTHER; note = 2'-O-methyluridine-3'-phosphorothioate
  modified_base 2: mod_base = OTHER; note = 2'-O-methyladenosine-3'-phosphorothioate
  modified_base 3: mod_base = OTHER; note = 2'-O-methyluridine-3'-phosphate
  modified_base 4: mod_base = OTHER; note = 2'-O-methyluridine-3'-phosphate
  modified_base 5: mod_base = OTHER; note = 2'-O-methyladenosine-3'-phosphate
  modified_base 6: mod_base = OTHER; note = 2'-O-methyladenosine-3'-phosphate
  modified_base 7: mod_base = OTHER; note = 2'-deoxy-2'-fluorocytidine-3'-phosphate
  modified_base 8: mod_base = OTHER; note = 2'-O-methyluridine-3'-phosphate
  modified_base 9: mod_base = OTHER; note = 2'-deoxy-2'-fluoroadenosine-3'-phosphate
  modified_base 10: mod_base = OTHER; note = 2'-deoxy-2'-fluorocytidine-3'-phosphate
  modified_base 11: mod_base = OTHER; note = 2'-deoxy-2'-fluoroadenosine-3'-phosphate
  modified_base 12: mod_base = OTHER; note = 2'-O-methylcytidine-3'-phosphate
  modified_base 13: mod_base = OTHER; note = 2'-O-methyluridine-3'-phosphate
  modified_base 14: mod_base = OTHER; note = 2'-O-methyladenosine-3'-phosphate
  modified_base 15: mod_base = OTHER; note = 2'-O-methylguanosine-3'-phosphate
  modified_base 16: mod_base = OTHER; note = 2'-O-methyladenosine-3'-phosphate
  modified_base 17: mod_base = OTHER; note = 2'-O-methylguanosine-3'-phosphate
  modified_base 18: mod_base = OTHER; note = 2'-O-methyladenosine-3'-phosphate
  modified_base 19: mod_base = OTHER; note = 2'-O-methyluridine-3'-phosphate
  modified_base 20: mod_base = OTHER; note = 2'-O-methyluridine-3'-phosphate
  modified_base 21: mod_base = OTHER; note = 2'-O-methyladenosine-3'-phosphate ((2S,4R)-1-[29-[[2-(acetylamino)-2-deoxy-beta-D-galactopyra nosyl]oxy]-14,14-bis[[3-[[3-[[5-[[2-(acetylamino)-2-deoxy-b eta-D-galactopyranosyl]oxy]-1-oxopentyl]amino]propyl]amino] -3-oxopropoxy]methyl]-1,12,19,25-tetraoxo-16-oxa-13,20,24-t riazanonacos-1-yl]-4-hydroxy-2-pyrrolidinyl)methyl ester
tattaactacactagagatta

SEQ ID NO: 276 - RNA, 21 nt, synthetic construct
  source 1..21: mol_type = other RNA
  modified_base 1: mod_base = OTHER; note = 2'-O-methyladenosine-3'-phosphorothioate
  modified_base 2: mod_base = OTHER; note = 2'-O-methyluridine-3'-phosphorothioate
  modified_base 3: mod_base = OTHER; note = 2'-O-methyladenosine-3'-phosphate
  modified_base 4: mod_base = OTHER; note = 2'-O-methyluridine-3'-phosphate
  modified_base 5: mod_base = OTHER; note = 2'-O-methyluridine-3'-phosphate
  modified_base 6: mod_base = OTHER; note = 2'-O-methylcytidine-3'-phosphate
  modified_base 7: mod_base = OTHER; note = 2'-deoxy-2'-fluoroadenosine-3'-phosphate
  modified_base 8: mod_base = OTHER; note = 2'-O-methyladenosine-3'-phosphate
  modified_base 9: mod_base = OTHER; note = 2'-deoxy-2'-fluoroguanosine-3'-phosphate
  modified_base 10: mod_base = OTHER; note = 2'-deoxy-2'-fluorocytidine-3'-phosphate
  modified_base 11: mod_base = OTHER; note = 2'-deoxy-2'-fluoroadenosine-3'-phosphate
  modified_base 12: mod_base = OTHER; note = 2'-O-methylcytidine-3'-phosphate
  modified_base 13: mod_base = OTHER; note = 2'-O-methyladenosine-3'-phosphate
  modified_base 14: mod_base = OTHER; note = 2'-O-methyluridine-3'-phosphate
  modified_base 15: mod_base = OTHER; note = 2'-O-methyladenosine-3'-phosphate
  modified_base 16: mod_base = OTHER; note = 2'-O-methyluridine-3'-phosphate
  modified_base 17: mod_base = OTHER; note = 2'-O-methylcytidine-3'-phosphate
  modified_base 18: mod_base = OTHER; note = 2'-O-methyladenosine-3'-phosphate
  modified_base 19: mod_base = OTHER; note = 2'-O-methylcytidine-3'-phosphate
  modified_base 20: mod_base = OTHER; note = 2'-O-methylguanosine-3'-phosphate
  modified_base 21: mod_base = OTHER; note = 2'-O-methyladenosine-3'-phosphate ((2S,4R)-1-[29-[[2-(acetylamino)-2-deoxy-beta-D-galactopyra nosyl]oxy]-14,14-bis[[3-[[3-[[5-[[2-(acetylamino)-2-deoxy-b eta-D-galactopyranosyl]oxy]-1-oxopentyl]amino]propyl]amino] -3-oxopropoxy]methyl]-1,12,19,25-tetraoxo-16-oxa-13,20,24-t riazanonacos-1-yl]-4-hydroxy-2-pyrrolidinyl)methyl ester
atattcaagcacatatcacga

SEQ ID NO: 277 - RNA, 21 nt, synthetic construct
  source 1..21: mol_type = other RNA
  modified_base 1: mod_base = OTHER; note = 2'-O-methyladenosine-3'-phosphorothioate
  modified_base 2: mod_base = OTHER; note = 2'-O-methyluridine-3'-phosphorothioate
  modified_base 3: mod_base = OTHER; note = 2'-O-methyluridine-3'-phosphate
  modified_base 4: mod_base = OTHER; note = 2'-O-methylcytidine-3'-phosphate
  modified_base 5: mod_base = OTHER; note = 2'-O-methyladenosine-3'-phosphate
  modified_base 6: mod_base = OTHER; note = 2'-O-methyladenosine-3'-phosphate
  modified_base 7: mod_base = OTHER; note = 2'-deoxy-2'-fluoroguanosine-3'-phosphate
  modified_base 8: mod_base = OTHER; note = 2'-O-methylcytidine-3'-phosphate
  modified_base 9: mod_base = OTHER; note = 2'-deoxy-2'-fluoroadenosine-3'-phosphate
  modified_base 10: mod_base = OTHER; note = 2'-deoxy-2'-fluorocytidine-3'-phosphate
  modified_base 11: mod_base = OTHER; note = 2'-deoxy-2'-fluoroadenosine-3'-phosphate
  modified_base 12: mod_base = OTHER; note = 2'-O-methyluridine-3'-phosphate
  modified_base 13: mod_base = OTHER; note = 2'-O-methyladenosine-3'-phosphate
  modified_base 14: mod_base = OTHER; note = 2'-O-methyluridine-3'-phosphate
  modified_base 15: mod_base = OTHER; note = 2'-O-methylcytidine-3'-phosphate
  modified_base 16: mod_base = OTHER; note = 2'-O-methyladenosine-3'-phosphate
  modified_base 17: mod_base = OTHER; note = 2'-O-methylcytidine-3'-phosphate
  modified_base 18: mod_base = OTHER; note = 2'-O-methylguanosine-3'-phosphate
  modified_base 19: mod_base = OTHER; note = 2'-O-methyluridine-3'-phosphate
  modified_base 20: mod_base = OTHER; note = 2'-O-methyladenosine-3'-phosphate
  modified_base 21: mod_base = OTHER; note = 2'-O-methyladenosine-3'-phosphate ((2S,4R)-1-[29-[[2-(acetylamino)-2-deoxy-beta-D-galactopyra nosyl]oxy]-14,14-bis[[3-[[3-[[5-[[2-(acetylamino)-2-deoxy-b eta-D-galactopyranosyl]oxy]-1-oxopentyl]amino]propyl]amino] -3-oxopropoxy]methyl]-1,12,19,25-tetraoxo-16-oxa-13,20,24-t riazanonacos-1-yl]-4-hydroxy-2-pyrrolidinyl)methyl ester
attcaagcacatatcacgtaa

SEQ ID NO: 278 - RNA, 21 nt, synthetic construct
  source 1..21: mol_type = other RNA
  modified_base 1: mod_base = OTHER; note = 2'-O-methyluridine-3'-phosphorothioate
  modified_base 2: mod_base = OTHER; note = 2'-O-methyluridine-3'-phosphorothioate
  modified_base 3: mod_base = OTHER; note = 2'-O-methylcytidine-3'-phosphate
  modified_base 4: mod_base = OTHER; note = 2'-O-methyladenosine-3'-phosphate
  modified_base 5: mod_base = OTHER; note = 2'-O-methyladenosine-3'-phosphate
  modified_base 6: mod_base = OTHER; note = 2'-O-methylguanosine-3'-phosphate
  modified_base 7: mod_base = OTHER; note = 2'-deoxy-2'-fluorocytidine-3'-phosphate
  modified_base 8: mod_base = OTHER; note = 2'-O-methyladenosine-3'-phosphate
  modified_base 9: mod_base = OTHER; note = 2'-deoxy-2'-fluorocytidine-3'-phosphate
  modified_base 10: mod_base = OTHER; note = 2'-deoxy-2'-fluoroadenosine-3'-phosphate
  modified_base 11: mod_base = OTHER; note = 2'-deoxy-2'-fluorouridine-3'-phosphate
  modified_base 12: mod_base = OTHER; note = 2'-O-methyladenosine-3'-phosphate
  modified_base 13: mod_base = OTHER; note = 2'-O-methyluridine-3'-phosphate
  modified_base 14: mod_base = OTHER; note = 2'-O-methylcytidine-3'-phosphate
  modified_base 15: mod_base = OTHER; note = 2'-O-methyladenosine-3'-phosphate
  modified_base 16: mod_base = OTHER; note = 2'-O-methylcytidine-3'-phosphate
  modified_base 17: mod_base = OTHER; note = 2'-O-methylguanosine-3'-phosphate
  modified_base 18: mod_base = OTHER; note = 2'-O-methyluridine-3'-phosphate
  modified_base 19: mod_base = OTHER; note = 2'-O-methyladenosine-3'-phosphate
  modified_base 20: mod_base = OTHER; note = 2'-O-methyladenosine-3'-phosphate
  modified_base 21: mod_base = OTHER; note = 2'-O-methyladenosine-3'-phosphate ((2S,4R)-1-[29-[[2-(acetylamino)-2-deoxy-beta-D-galactopyra nosyl]oxy]-14,14-bis[[3-[[3-[[5-[[2-(acetylamino)-2-deoxy-b eta-D-galactopyranosyl]oxy]-1-oxopentyl]amino]propyl]amino] -3-oxopropoxy]methyl]-1,12,19,25-tetraoxo-16-oxa-13,20,24-t riazanonacos-1-yl]-4-hydroxy-2-pyrrolidinyl)methyl ester
ttcaagcacatatcacgtaaa

SEQ ID NO: 279 - RNA, 21 nt, synthetic construct
  source 1..21: mol_type = other RNA
  modified_base 1: mod_base = OTHER; note = 2'-O-methyluridine-3'-phosphorothioate
  modified_base 2: mod_base = OTHER; note = 2'-O-methylcytidine-3'-phosphorothioate
  modified_base 3: mod_base = OTHER; note = 2'-O-methyladenosine-3'-phosphate
  modified_base 4: mod_base = OTHER; note = 2'-O-methyladenosine-3'-phosphate
  modified_base 5: mod_base = OTHER; note = 2'-O-methylguanosine-3'-phosphate
  modified_base 6: mod_base = OTHER; note = 2'-O-methylcytidine-3'-phosphate
  modified_base 7: mod_base = OTHER; note = 2'-deoxy-2'-fluoroadenosine-3'-phosphate
  modified_base 8: mod_base = OTHER; note = 2'-O-methylcytidine-3'-phosphate
  modified_base 9: mod_base = OTHER; note = 2'-deoxy-2'-fluoroadenosine-3'-phosphate
  modified_base 10: mod_base = OTHER; note = 2'-deoxy-2'-fluorouridine-3'-phosphate
  modified_base 11: mod_base = OTHER; note = 2'-deoxy-2'-fluoroadenosine-3'-phosphate
  modified_base 12: mod_base = OTHER; note = 2'-O-methyluridine-3'-phosphate
  modified_base 13: mod_base = OTHER; note = 2'-O-methylcytidine-3'-phosphate
  modified_base 14: mod_base = OTHER; note = 2'-O-methyladenosine-3'-phosphate
  modified_base 15: mod_base = OTHER; note = 2'-O-methylcytidine-3'-phosphate
  modified_base 16: mod_base = OTHER; note = 2'-O-methylguanosine-3'-phosphate
  modified_base 17: mod_base = OTHER; note = 2'-O-methyluridine-3'-phosphate
  modified_base 18: mod_base = OTHER; note = 2'-O-methyladenosine-3'-phosphate
  modified_base 19: mod_base = OTHER; note = 2'-O-methyladenosine-3'-phosphate
  modified_base 20: mod_base = OTHER; note = 2'-O-methylcytidine-3'-phosphate
  modified_base 21: mod_base = OTHER; note = 2'-O-methyladenosine-3'-phosphate ((2S,4R)-1-[29-[[2-(acetylamino)-2-deoxy-beta-D-galactopyra nosyl]oxy]-14,14-bis[[3-[[3-[[5-[[2-(acetylamino)-2-deoxy-b eta-D-galactopyranosyl]oxy]-1-oxopentyl]amino]propyl]amino] -3-oxopropoxy]methyl]-1,12,19,25-tetraoxo-16-oxa-13,20,24-t riazanonacos-1-yl]-4-hydroxy-2-pyrrolidinyl)methyl ester
tcaagcacatatcacgtaaca

SEQ ID NO: 280 - RNA, 21 nt, synthetic construct
  source 1..21: mol_type = other RNA
  modified_base 1: mod_base = OTHER; note = 2'-O-methyladenosine-3'-phosphorothioate
  modified_base 2: mod_base = OTHER; note = 2'-O-methylguanosine-3'-phosphorothioate
  modified_base 3: mod_base = OTHER; note = 2'-O-methylcytidine-3'-phosphate
  modified_base 4: mod_base = OTHER; note = 2'-O-methyladenosine-3'-phosphate
  modified_base 5: mod_base = OTHER; note = 2'-O-methylcytidine-3'-phosphate
  modified_base 6: mod_base = OTHER; note = 2'-O-methyladenosine-3'-phosphate
  modified_base 7: mod_base = OTHER; note = 2'-deoxy-2'-fluorouridine-3'-phosphate
  modified_base 8: mod_base = OTHER; note = 2'-O-methyladenosine-3'-phosphate
  modified_base 9: mod_base = OTHER; note = 2'-deoxy-2'-fluorouridine-3'-phosphate
  modified_base 10: mod_base = OTHER; note = 2'-deoxy-2'-fluorocytidine-3'-phosphate
  modified_base 11: mod_base = OTHER; note = 2'-deoxy-2'-fluoroadenosine-3'-phosphate
  modified_base 12: mod_base = OTHER; note = 2'-O-methylcytidine-3'-phosphate
  modified_base 13: mod_base = OTHER; note = 2'-O-methylguanosine-3'-phosphate
  modified_base 14: mod_base = OTHER; note = 2'-O-methyluridine-3'-phosphate
  modified_base 15: mod_base = OTHER; note = 2'-O-methyladenosine-3'-phosphate
  modified_base 16: mod_base = OTHER; note = 2'-O-methyladenosine-3'-phosphate
  modified_base 17: mod_base = OTHER; note = 2'-O-methylcytidine-3'-phosphate
  modified_base 18: mod_base = OTHER; note = 2'-O-methyladenosine-3'-phosphate
  modified_base 19: mod_base = OTHER; note = 2'-O-methylguanosine-3'-phosphate
  modified_base 20: mod_base = OTHER; note = 2'-O-methyluridine-3'-phosphate
  modified_base 21: mod_base = OTHER; note = 2'-O-methyladenosine-3'-phosphate ((2S,4R)-1-[29-[[2-(acetylamino)-2-deoxy-beta-D-galactopyra nosyl]oxy]-14,14-bis[[3-[[3-[[5-[[2-(acetylamino)-2-deoxy-b eta-D-galactopyranosyl]oxy]-1-oxopentyl]amino]propyl]amino] -3-oxopropoxy]methyl]-1,12,19,25-tetraoxo-16-oxa-13,20,24-t riazanonacos-1-yl]-4-hydroxy-2-pyrrolidinyl)methyl ester
agcacatatcacgtaacagta

SEQ ID NO: 281 - RNA, 21 nt, synthetic construct
  source 1..21: mol_type = other RNA
  modified_base 1: mod_base = OTHER; note = 2'-O-methylcytidine-3'-phosphorothioate
  modified_base 2: mod_base = OTHER; note = 2'-O-methyladenosine-3'-phosphorothioate
  modified_base 3: mod_base = OTHER; note = 2'-O-methylguanosine-3'-phosphate
  modified_base 4: mod_base = OTHER; note = 2'-O-methyluridine-3'-phosphate
  modified_base 5: mod_base = OTHER; note = 2'-O-methyluridine-3'-phosphate
  modified_base 6: mod_base = OTHER; note = 2'-O-methyluridine-3'-phosphate
  modified_base 7: mod_base = OTHER; note = 2'-deoxy-2'-fluoroadenosine-3'-phosphate
  modified_base 8: mod_base = OTHER; note = 2'-O-methyladenosine-3'-phosphate
  modified_base 9: mod_base = OTHER; note = 2'-deoxy-2'-fluorouridine-3'-phosphate
  modified_base 10: mod_base = OTHER; note = 2'-deoxy-2'-fluoroadenosine-3'-phosphate
  modified_base 11: mod_base = OTHER; note = 2'-deoxy-2'-fluorouridine-3'-phosphate
  modified_base 12: mod_base = OTHER; note = 2'-O-methylguanosine-3'-phosphate
  modified_base 13: mod_base = OTHER; note = 2'-O-methylguanosine-3'-phosphate
  modified_base 14: mod_base = OTHER; note = 2'-O-methyladenosine-3'-phosphate
  modified_base 15: mod_base = OTHER; note = 2'-O-methyladenosine-3'-phosphate
  modified_base 16: mod_base = OTHER; note = 2'-O-methylcytidine-3'-phosphate
  modified_base 17: mod_base = OTHER; note = 2'-O-methyladenosine-3'-phosphate
  modified_base 18: mod_base = OTHER; note = 2'-O-methyladenosine-3'-phosphate
  modified_base 19: mod_base = OTHER; note = 2'-O-methyladenosine-3'-phosphate
  modified_base 20: mod_base = OTHER; note = 2'-O-methylcytidine-3'-phosphate
  modified_base 21: mod_base = OTHER; note = 2'-O-methyladenosine-3'-phosphate ((2S,4R)-1-[29-[[2-(acetylamino)-2-deoxy-beta-D-galactopyra nosyl]oxy]-14,14-bis[[3-[[3-[[5-[[2-(acetylamino)-2-deoxy-b eta-D-galactopyranosyl]oxy]-1-oxopentyl]amino]propyl]amino] -3-oxopropoxy]methyl]-1,12,19,25-tetraoxo-16-oxa-13,20,24-t riazanonacos-1-yl]-4-hydroxy-2-pyrrolidinyl)methyl ester
cagtttaatatggaacaaaca

SEQ ID NO: 282 - RNA, 21 nt, synthetic construct
  source 1..21: mol_type = other RNA
  modified_base 1: mod_base = OTHER; note = 2'-O-methylcytidine-3'-phosphorothioate
  modified_base 2: mod_base = OTHER; note = 2'-O-methyladenosine-3'-phosphorothioate
  modified_base 3: mod_base = OTHER; note = 2'-O-methyluridine-3'-phosphate
  modified_base 4: mod_base = OTHER; note = 2'-O-methylcytidine-3'-phosphate
  modified_base 5: mod_base = OTHER; note = 2'-O-methylcytidine-3'-phosphate
  modified_base 6: mod_base = OTHER; note = 2'-O-methyluridine-3'-phosphate
  modified_base 7: mod_base = OTHER; note = 2'-deoxy-2'-fluoroguanosine-3'-phosphate
  modified_base 8: mod_base = OTHER; note = 2'-O-methylguanosine-3'-phosphate
  modified_base 9: mod_base = OTHER; note = 2'-deoxy-2'-fluoroadenosine-3'-phosphate
  modified_base 10: mod_base = OTHER; note = 2'-deoxy-2'-fluoroguanosine-3'-phosphate
  modified_base 11: mod_base = OTHER; note = 2'-deoxy-2'-fluoroguanosine-3'-phosphate
  modified_base 12: mod_base = OTHER; note = 2'-O-methyladenosine-3'-phosphate
  modified_base 13: mod_base = OTHER; note = 2'-O-methyluridine-3'-phosphate
  modified_base 14: mod_base = OTHER; note = 2'-O-methyluridine-3'-phosphate
  modified_base 15: mod_base = OTHER; note = 2'-O-methylguanosine-3'-phosphate
  modified_base 16: mod_base = OTHER; note = 2'-O-methyluridine-3'-phosphate
  modified_base 17: mod_base = OTHER; note = 2'-O-methyluridine-3'-phosphate
  modified_base 18: mod_base = OTHER; note = 2'-O-methylcytidine-3'-phosphate
  modified_base 19: mod_base = OTHER; note = 2'-O-methylguanosine-3'-phosphate
  modified_base 20: mod_base = OTHER; note = 2'-O-methyluridine-3'-phosphate
  modified_base 21: mod_base = OTHER; note = 2'-O-methyladenosine-3'-phosphate ((2S,4R)-1-[29-[[2-(acetylamino)-2-deoxy-beta-D-galactopyra nosyl]oxy]-14,14-bis[[3-[[3-[[5-[[2-(acetylamino)-2-deoxy-b eta-D-galactopyranosyl]oxy]-1-oxopentyl]amino]propyl]amino] -3-oxopropoxy]methyl]-1,12,19,25-tetraoxo-16-oxa-13,20,24-t riazanonacos-1-yl]-4-hydroxy-2-pyrrolidinyl)methyl ester
catcctggaggattgttcgta

SEQ ID NO: 283 - RNA, 21 nt, synthetic construct
  source 1..21: mol_type = other RNA
  modified_base 1: mod_base = OTHER; note = 2'-O-methyladenosine-3'-phosphorothioate
  modified_base 2: mod_base = OTHER; note = 2'-O-methyluridine-3'-phosphorothioate
  modified_base 3: mod_base = OTHER; note = 2'-O-methyluridine-3'-phosphate
  modified_base 4: mod_base = OTHER; note = 2'-O-methyluridine-3'-phosphate
  modified_base 5: mod_base = OTHER; note = 2'-O-methylcytidine-3'-phosphate
  modified_base 6: mod_base = OTHER; note = 2'-O-methylcytidine-3'-phosphate
  modified_base 7: mod_base = OTHER; note = 2'-deoxy-2'-fluorocytidine-3'-phosphate
  modified_base 8: mod_base = OTHER; note = 2'-O-methyluridine-3'-phosphate
  modified_base 9: mod_base = OTHER; note = 2'-deoxy-2'-fluorouridine-3'-phosphate
  modified_base 10: mod_base = OTHER; note = 2'-deoxy-2'-fluoroadenosine-3'-phosphate
  modified_base 11: mod_base = OTHER; note = 2'-deoxy-2'-fluorocytidine-3'-phosphate
  modified_base 12: mod_base = OTHER; note = 2'-O-methyluridine-3'-phosphate
  modified_base 13: mod_base = OTHER; note = 2'-O-methyladenosine-3'-phosphate
  modified_base 14: mod_base = OTHER; note = 2'-O-methylcytidine-3'-phosphate
  modified_base 15: mod_base = OTHER; note = 2'-O-methyluridine-3'-phosphate
  modified_base 16: mod_base = OTHER; note = 2'-O-methyladenosine-3'-phosphate
  modified_base 17: mod_base = OTHER; note = 2'-O-methyluridine-3'-phosphate
  modified_base 18: mod_base = OTHER; note = 2'-O-methylguanosine-3'-phosphate
  modified_base 19: mod_base = OTHER; note = 2'-O-methylcytidine-3'-phosphate
  modified_base 20: mod_base = OTHER; note = 2'-O-methyluridine-3'-phosphate
  modified_base 21: mod_base = OTHER; note = 2'-O-methyladenosine-3'-phosphate ((2S,4R)-1-[29-[[2-(acetylamino)-2-deoxy-beta-D-galactopyra nosyl]oxy]-14,14-bis[[3-[[3-[[5-[[2-(acetylamino)-2-deoxy-b eta-D-galactopyranosyl]oxy]-1-oxopentyl]amino]propyl]amino] -3-oxopropoxy]methyl]-1,12,19,25-tetraoxo-16-oxa-13,20,24-t riazanonacos-1-yl]-4-hydroxy-2-pyrrolidinyl)methyl ester
atttcccttactactatgcta

SEQ ID NO: 284 - RNA, 21 nt, synthetic construct
  source 1..21: mol_type = other RNA
  modified_base 1: mod_base = OTHER; note = 2'-O-methyluridine-3'-phosphorothioate
  modified_base 2: mod_base = OTHER; note = 2'-O-methyluridine-3'-phosphorothioate
  modified_base 3: mod_base = OTHER; note = 2'-O-methyluridine-3'-phosphate
  modified_base 4: mod_base = OTHER; note = 2'-O-methylcytidine-3'-phosphate
  modified_base 5: mod_base = OTHER; note = 2'-O-methylcytidine-3'-phosphate
  modified_base 6: mod_base = OTHER; note = 2'-O-methylcytidine-3'-phosphate
  modified_base 7: mod_base = OTHER; note = 2'-deoxy-2'-fluorouridine-3'-phosphate
  modified_base 8: mod_base = OTHER; note = 2'-O-methyluridine-3'-phosphate
  modified_base 9: mod_base = OTHER; note = 2'-deoxy-2'-fluoroadenosine-3'-phosphate
  modified_base 10: mod_base = OTHER; note = 2'-deoxy-2'-fluorocytidine-3'-phosphate
  modified_base 11: mod_base = OTHER; note = 2'-deoxy-2'-fluorouridine-3'-phosphate
  modified_base 12: mod_base = OTHER; note = 2'-O-methyladenosine-3'-phosphate
  modified_base 13: mod_base = OTHER; note = 2'-O-methylcytidine-3'-phosphate
  modified_base 14: mod_base = OTHER; note = 2'-O-methyluridine-3'-phosphate
  modified_base 15: mod_base = OTHER; note = 2'-O-methyladenosine-3'-phosphate
  modified_base 16: mod_base = OTHER; note = 2'-O-methyluridine-3'-phosphate
  modified_base 17: mod_base = OTHER; note = 2'-O-methylguanosine-3'-phosphate
  modified_base 18: mod_base = OTHER; note = 2'-O-methylcytidine-3'-phosphate
  modified_base 19: mod_base = OTHER; note = 2'-O-methyluridine-3'-phosphate
  modified_base 20: mod_base = OTHER; note = 2'-O-methyladenosine-3'-phosphate
  modified_base 21: mod_base = OTHER; note = 2'-O-methyladenosine-3'-phosphate ((2S,4R)-1-[29-[[2-(acetylamino)-2-deoxy-beta-D-galactopyra nosyl]oxy]-14,14-bis[[3-[[3-[[5-[[2-(acetylamino)-2-deoxy-b eta-D-galactopyranosyl]oxy]-1-oxopentyl]amino]propyl]amino] -3-oxopropoxy]methyl]-1,12,19,25-tetraoxo-16-oxa-13,20,24-t riazanonacos-1-yl]-4-hydroxy-2-pyrrolidinyl)methyl ester
tttcccttactactatgctaa

SEQ ID NO: 285 - RNA, 21 nt, synthetic construct
  source 1..21: mol_type = other RNA
  modified_base 1: mod_base = OTHER; note = 2'-O-methyluridine-3'-phosphorothioate
  modified_base 2: mod_base = OTHER; note = 2'-O-methyluridine-3'-phosphorothioate
  modified_base 3: mod_base = OTHER; note = 2'-O-methylcytidine-3'-phosphate
  modified_base 4: mod_base = OTHER; note = 2'-O-methylcytidine-3'-phosphate
  modified_base 5: mod_base = OTHER; note = 2'-O-methylcytidine-3'-phosphate
  modified_base 6: mod_base = OTHER; note = 2'-O-methyluridine-3'-phosphate
  modified_base 7: mod_base = OTHER; note = 2'-deoxy-2'-fluorouridine-3'-phosphate
  modified_base 8: mod_base = OTHER; note = 2'-O-methyladenosine-3'-phosphate
  modified_base 9: mod_base = OTHER; note = 2'-deoxy-2'-fluorocytidine-3'-phosphate
  modified_base 10: mod_base = OTHER; note = 2'-deoxy-2'-fluorouridine-3'-phosphate
  modified_base 11: mod_base = OTHER; note = 2'-deoxy-2'-fluoroadenosine-3'-phosphate
  modified_base 12: mod_base = OTHER; note = 2'-O-methylcytidine-3'-phosphate
  modified_base 13: mod_base = OTHER; note = 2'-O-methyluridine-3'-phosphate
  modified_base 14: mod_base = OTHER; note = 2'-O-methyladenosine-3'-phosphate
  modified_base 15: mod_base = OTHER; note = 2'-O-methyluridine-3'-phosphate
  modified_base 16: mod_base = OTHER; note = 2'-O-methylguanosine-3'-phosphate
  modified_base 17: mod_base = OTHER; note = 2'-O-methylcytidine-3'-phosphate
  modified_base 18: mod_base = OTHER; note = 2'-O-methyluridine-3'-phosphate
  modified_base 19: mod_base = OTHER; note = 2'-O-methyladenosine-3'-phosphate
  modified_base 20: mod_base = OTHER; note = 2'-O-methyladenosine-3'-phosphate
  modified_base 21: mod_base = OTHER; note = 2'-O-methyladenosine-3'-phosphate ((2S,4R)-1-[29-[[2-(acetylamino)-2-deoxy-beta-D-galactopyra nosyl]oxy]-14,14-bis[[3-[[3-[[5-[[2-(acetylamino)-2-deoxy-b eta-D-galactopyranosyl]oxy]-1-oxopentyl]amino]propyl]amino] -3-oxopropoxy]methyl]-1,12,19,25-tetraoxo-16-oxa-13,20,24-t riazanonacos-1-yl]-4-hydroxy-2-pyrrolidinyl)methyl ester
ttcccttactactatgctaaa

SEQ ID NO: 286 - RNA, 21 nt, synthetic construct
  source 1..21: mol_type = other RNA
  modified_base 1: mod_base = OTHER; note = 2'-O-methyluridine-3'-phosphorothioate
  modified_base 2: mod_base = OTHER; note = 2'-O-methylcytidine-3'-phosphorothioate
  modified_base 3: mod_base = OTHER; note = 2'-O-methylcytidine-3'-phosphate
  modified_base 4: mod_base = OTHER; note = 2'-O-methylcytidine-3'-phosphate
  modified_base 5: mod_base = OTHER; note = 2'-O-methyluridine-3'-phosphate
  modified_base 6: mod_base = OTHER; note = 2'-O-methyluridine-3'-phosphate
  modified_base 7: mod_base = OTHER; note = 2'-deoxy-2'-fluoroadenosine-3'-phosphate
  modified_base 8: mod_base = OTHER; note = 2'-O-methylcytidine-3'-phosphate
  modified_base 9: mod_base = OTHER; note = 2'-deoxy-2'-fluorouridine-3'-phosphate
  modified_base 10: mod_base = OTHER; note = 2'-deoxy-2'-fluoroadenosine-3'-phosphate
  modified_base 11: mod_base = OTHER; note = 2'-deoxy-2'-fluorocytidine-3'-phosphate
  modified_base 12: mod_base = OTHER; note = 2'-O-methyluridine-3'-phosphate
  modified_base 13: mod_base = OTHER; note = 2'-O-methyladenosine-3'-phosphate
  modified_base 14: mod_base = OTHER; note = 2'-O-methyluridine-3'-phosphate
  modified_base 15: mod_base = OTHER; note = 2'-O-methylguanosine-3'-phosphate
  modified_base 16: mod_base = OTHER; note = 2'-O-methylcytidine-3'-phosphate
  modified_base 17: mod_base = OTHER; note = 2'-O-methyluridine-3'-phosphate
  modified_base 18: mod_base = OTHER; note = 2'-O-methyladenosine-3'-phosphate
  modified_base 19: mod_base = OTHER; note = 2'-O-methyladenosine-3'-phosphate
  modified_base 20: mod_base = OTHER; note = 2'-O-methyluridine-3'-phosphate
  modified_base 21: mod_base = OTHER; note = 2'-O-methyladenosine-3'-phosphate ((2S,4R)-1-[29-[[2-(acetylamino)-2-deoxy-beta-D-galactopyra nosyl]oxy]-14,14-bis[[3-[[3-[[5-[[2-(acetylamino)-2-deoxy-b eta-D-galactopyranosyl]oxy]-1-oxopentyl]amino]propyl]amino] -3-oxopropoxy]methyl]-1,12,19,25-tetraoxo-16-oxa-13,20,24-t riazanonacos-1-yl]-4-hydroxy-2-pyrrolidinyl)methyl ester
tcccttactactatgctaata

SEQ ID NO: 287 - RNA, 21 nt, synthetic construct
  source 1..21: mol_type = other RNA
  modified_base 1: mod_base = OTHER; note = 2'-O-methylcytidine-3'-phosphorothioate
  modified_base 2: mod_base = OTHER; note = 2'-O-methylcytidine-3'-phosphorothioate
  modified_base 3: mod_base = OTHER; note = 2'-O-methylcytidine-3'-phosphate
  modified_base 4: mod_base = OTHER; note = 2'-O-methyluridine-3'-phosphate
  modified_base 5: mod_base = OTHER; note = 2'-O-methyluridine-3'-phosphate
  modified_base 6: mod_base = OTHER; note = 2'-O-methyladenosine-3'-phosphate
  modified_base 7: mod_base = OTHER; note = 2'-deoxy-2'-fluorocytidine-3'-phosphate
  modified_base 8: mod_base = OTHER; note = 2'-O-methyluridine-3'-phosphate
  modified_base 9: mod_base = OTHER; note = 2'-deoxy-2'-fluoroadenosine-3'-phosphate
  modified_base 10: mod_base = OTHER; note = 2'-deoxy-2'-fluorocytidine-3'-phosphate
  modified_base 11: mod_base = OTHER; note = 2'-deoxy-2'-fluorouridine-3'-phosphate
  modified_base 12: mod_base = OTHER; note = 2'-O-methyladenosine-3'-phosphate
  modified_base 13: mod_base = OTHER; note = 2'-O-methyluridine-3'-phosphate
  modified_base 14: mod_base = OTHER; note = 2'-O-methylguanosine-3'-phosphate
  modified_base 15: mod_base = OTHER; note = 2'-O-methylcytidine-3'-phosphate
  modified_base 16: mod_base = OTHER; note = 2'-O-methyluridine-3'-phosphate
  modified_base 17: mod_base = OTHER; note = 2'-O-methyladenosine-3'-phosphate
  modified_base 18: mod_base = OTHER; note = 2'-O-methyladenosine-3'-phosphate
  modified_base 19: mod_base = OTHER; note = 2'-O-methyluridine-3'-phosphate
  modified_base 20: mod_base = OTHER; note = 2'-O-methyluridine-3'-phosphate
  modified_base 21: mod_base = OTHER; note = 2'-O-methyladenosine-3'-phosphate ((2S,4R)-1-[29-[[2-(acetylamino)-2-deoxy-beta-D-galactopyra nosyl]oxy]-14,14-bis[[3-[[3-[[5-[[2-(acetylamino)-2-deoxy-b eta-D-galactopyranosyl]oxy]-1-oxopentyl]amino]propyl]amino] -3-oxopropoxy]methyl]-1,12,19,25-tetraoxo-16-oxa-13,20,24-t riazanonacos-1-yl]-4-hydroxy-2-pyrrolidinyl)methyl ester
cccttactactatgctaatta

SEQ ID NO: 288 - RNA, 21 nt, synthetic construct
  source 1..21: mol_type = other RNA
  modified_base 1: mod_base = OTHER; note = 2'-O-methyluridine-3'-phosphorothioate
  modified_base 2: mod_base = OTHER; note = 2'-O-methyladenosine-3'-phosphorothioate
  modified_base 3: mod_base = OTHER; note = 2'-O-methylcytidine-3'-phosphate
  modified_base 4: mod_base = OTHER; note = 2'-O-methyluridine-3'-phosphate
  modified_base 5: mod_base = OTHER; note = 2'-O-methyladenosine-3'-phosphate
  modified_base 6: mod_base = OTHER; note = 2'-O-methylcytidine-3'-phosphate
  modified_base 7: mod_base = OTHER; note = 2'-deoxy-2'-fluorouridine-3'-phosphate
  modified_base 8: mod_base = OTHER; note = 2'-O-methyladenosine-3'-phosphate
  modified_base 9: mod_base = OTHER; note = 2'-deoxy-2'-fluorouridine-3'-phosphate
  modified_base 10: mod_base = OTHER; note = 2'-deoxy-2'-fluoroguanosine-3'-phosphate
  modified_base 11: mod_base = OTHER; note = 2'-deoxy-2'-fluorocytidine-3'-phosphate
  modified_base 12: mod_base = OTHER; note = 2'-O-methyluridine-3'-phosphate
  modified_base 13: mod_base = OTHER; note = 2'-O-methyladenosine-3'-phosphate
  modified_base 14: mod_base = OTHER; note = 2'-O-methyladenosine-3'-phosphate
  modified_base 15: mod_base = OTHER; note = 2'-O-methyluridine-3'-phosphate
  modified_base 16: mod_base = OTHER; note = 2'-O-methyluridine-3'-phosphate
  modified_base 17: mod_base = OTHER; note = 2'-O-methyluridine-3'-phosphate
  modified_base 18: mod_base = OTHER; note = 2'-O-methyladenosine-3'-phosphate
  modified_base 19: mod_base = OTHER; note = 2'-O-methylguanosine-3'-phosphate
  modified_base 20: mod_base = OTHER; note = 2'-O-methylguanosine-3'-phosphate
  modified_base 21: mod_base = OTHER; note = 2'-O-methyladenosine-3'-phosphate ((2S,4R)-1-[29-[[2-(acetylamino)-2-deoxy-beta-D-galactopyra nosyl]oxy]-14,14-bis[[3-[[3-[[5-[[2-(acetylamino)-2-deoxy-b eta-D-galactopyranosyl]oxy]-1-oxopentyl]amino]propyl]amino] -3-oxopropoxy]methyl]-1,12,19,25-tetraoxo-16-oxa-13,20,24-t riazanonacos-1-yl]-4-hydroxy-2-pyrrolidinyl)methyl ester
tactactatgctaatttagga

SEQ ID NO: 289 - RNA, 21 nt, synthetic construct
  source 1..21: mol_type = other RNA
  modified_base 1: mod_base = OTHER; note = 2'-O-methylguanosine-3'-phosphorothioate
  modified_base 2: mod_base = OTHER; note = 2'-O-methyluridine-3'-phosphorothioate
  modified_base 3: mod_base = OTHER; note = 2'-O-methyluridine-3'-phosphate
  modified_base 4: mod_base = OTHER; note = 2'-O-methylcytidine-3'-phosphate
  modified_base 5: mod_base = OTHER; note = 2'-O-methyluridine-3'-phosphate
  modified_base 6: mod_base = OTHER; note = 2'-O-methylguanosine-3'-phosphate
  modified_base 7: mod_base = OTHER; note = 2'-deoxy-2'-fluorouridine-3'-phosphate
  modified_base 8: mod_base = OTHER; note = 2'-O-methylguanosine-3'-phosphate
  modified_base 9: mod_base = OTHER; note = 2'-deoxy-2'-fluoroguanosine-3'-phosphate
  modified_base 10: mod_base = OTHER; note = 2'-deoxy-2'-fluoroadenosine-3'-phosphate
  modified_base 11: mod_base = OTHER; note = 2'-deoxy-2'-fluoroadenosine-3'-phosphate
  modified_base 12: mod_base = OTHER; note = 2'-O-methyluridine-3'-phosphate
  modified_base 13: mod_base = OTHER; note = 2'-O-methyluridine-3'-phosphate
  modified_base 14: mod_base = OTHER; note = 2'-O-methylguanosine-3'-phosphate
  modified_base 15: mod_base = OTHER; note = 2'-O-methyluridine-3'-phosphate
  modified_base 16: mod_base = OTHER; note = 2'-O-methylguanosine-3'-phosphate
  modified_base 17: mod_base = OTHER; note = 2'-O-methyladenosine-3'-phosphate
  modified_base 18: mod_base = OTHER; note = 2'-O-methylcytidine-3'-phosphate
  modified_base 19: mod_base = OTHER; note = 2'-O-methyladenosine-3'-phosphate
  modified_base 20: mod_base = OTHER; note = 2'-O-methyladenosine-3'-phosphate
  modified_base 21: mod_base = OTHER; note = 2'-O-methyladenosine-3'-phosphate ((2S,4R)-1-[29-[[2-(acetylamino)-2-deoxy-beta-D-galactopyra nosyl]oxy]-14,14-bis[[3-[[3-[[5-[[2-(acetylamino)-2-deoxy-b eta-D-galactopyranosyl]oxy]-1-oxopentyl]amino]propyl]amino] -3-oxopropoxy]methyl]-1,12,19,25-tetraoxo-16-oxa-13,20,24-t riazanonacos-1-yl]-4-hydroxy-2-pyrrolidinyl)methyl ester
gttctgtggaattgtgacaaa

SEQ ID NO: 290 - RNA, 21 nt, synthetic construct
  source 1..21: mol_type = other RNA
  modified_base 1: mod_base = OTHER; note = 2'-O-methyluridine-3'-phosphorothioate
  modified_base 2: mod_base = OTHER; note = 2'-O-methyluridine-3'-phosphorothioate
  modified_base 3: mod_base = OTHER; note = 2'-O-methyluridine-3'-phosphate
  modified_base 4: mod_base = OTHER; note = 2'-O-methylcytidine-3'-phosphate
  modified_base 5: mod_base = OTHER; note = 2'-O-methyladenosine-3'-phosphate
  modified_base 6: mod_base = OTHER; note = 2'-O-methyladenosine-3'-phosphate
  modified_base 7: mod_base = OTHER; note = 2'-deoxy-2'-fluorocytidine-3'-phosphate
  modified_base 8: mod_base = OTHER; note = 2'-O-methyluridine-3'-phosphate
  modified_base 9: mod_base = OTHER; note = 2'-deoxy-2'-fluoroadenosine-3'-phosphate
  modified_base 10: mod_base = OTHER; note = 2'-deoxy-2'-fluorocytidine-3'-phosphate
  modified_base 11: mod_base = OTHER; note = 2'-deoxy-2'-fluoroguanosine-3'-phosphate
  modified_base 12: mod_base = OTHER; note = 2'-O-methylguanosine-3'-phosphate
  modified_base 13: mod_base = OTHER; note = 2'-O-methyladenosine-3'-phosphate
  modified_base 14: mod_base = OTHER; note = 2'-O-methyladenosine-3'-phosphate
  modified_base 15: mod_base = OTHER; note = 2'-O-methylguanosine-3'-phosphate
  modified_base 16: mod_base = OTHER; note = 2'-O-methyluridine-3'-phosphate
  modified_base 17: mod_base = OTHER; note = 2'-O-methylguanosine-3'-phosphate
  modified_base 18: mod_base = OTHER; note = 2'-O-methylguanosine-3'-phosphate
  modified_base 19: mod_base = OTHER; note = 2'-O-methyladenosine-3'-phosphate
  modified_base 20: mod_base = OTHER; note = 2'-O-methyluridine-3'-phosphate
  modified_base 21: mod_base = OTHER; note = 2'-O-methyladenosine-3'-phosphate ((2S,4R)-1-[29-[[2-(acetylamino)-2-deoxy-beta-D-galactopyra nosyl]oxy]-14,14-bis[[3-[[3-[[5-[[2-(acetylamino)-2-deoxy-b eta-D-galactopyranosyl]oxy]-1-oxopentyl]amino]propyl]amino] -3-oxopropoxy]methyl]-1,12,19,25-tetraoxo-16-oxa-13,20,24-t riazanonacos-1-yl]-4-hydroxy-2-pyrrolidinyl)methyl ester
tttcaactacggaagtggata

SEQ ID NO: 291 - RNA, 21 nt, synthetic construct
  source 1..21: mol_type = other RNA
  modified_base 1: mod_base = OTHER; note = 2'-O-methylcytidine-3'-phosphorothioate
  modified_base 2: mod_base = OTHER; note = 2'-O-methyladenosine-3'-phosphorothioate
  modified_base 3: mod_base = OTHER; note = 2'-O-methyluridine-3'-phosphate
  modified_base 4: mod_base = OTHER; note = 2'-O-methyluridine-3'-phosphate
  modified_base 5: mod_base = OTHER; note = 2'-O-methyluridine-3'-phosphate
  modified_base 6: mod_base = OTHER; note = 2'-O-methylcytidine-3'-phosphate
  modified_base 7: mod_base = OTHER; note = 2'-deoxy-2'-fluorouridine-3'-phosphate
  modified_base 8: mod_base = OTHER; note = 2'-O-methylguanosine-3'-phosphate
  modified_base 9: mod_base = OTHER; note = 2'-deoxy-2'-fluoroguanosine-3'-phosphate
  modified_base 10: mod_base = OTHER; note = 2'-deoxy-2'-fluoroguanosine-3'-phosphate
  modified_base 11: mod_base = OTHER; note = 2'-deoxy-2'-fluoroadenosine-3'-phosphate
  modified_base 12: mod_base = OTHER; note = 2'-O-methyluridine-3'-phosphate
  modified_base 13: mod_base = OTHER; note = 2'-O-methyladenosine-3'-phosphate
  modified_base 14: mod_base = OTHER; note = 2'-O-methyladenosine-3'-phosphate
  modified_base 15: mod_base = OTHER; note = 2'-O-methylcytidine-3'-phosphate
  modified_base 16: mod_base = OTHER; note = 2'-O-methyluridine-3'-phosphate
  modified_base 17: mod_base = OTHER; note = 2'-O-methylcytidine-3'-phosphate
  modified_base 18: mod_base = OTHER; note = 2'-O-methyladenosine-3'-phosphate
  modified_base 19: mod_base = OTHER; note = 2'-O-methyladenosine-3'-phosphate
  modified_base 20: mod_base = OTHER; note = 2'-O-methyladenosine-3'-phosphate
  modified_base 21: mod_base = OTHER; note = 2'-O-methyladenosine-3'-phosphate ((2S,4R)-1-[29-[[2-(acetylamino)-2-deoxy-beta-D-galactopyra nosyl]oxy]-14,14-bis[[3-[[3-[[5-[[2-(acetylamino)-2-deoxy-b eta-D-galactopyranosyl]oxy]-1-oxopentyl]amino]propyl]amino] -3-oxopropoxy]methyl]-1,12,19,25-tetraoxo-16-oxa-13,20,24-t riazanonacos-1-yl]-4-hydroxy-2-pyrrolidinyl)methyl ester
catttctgggataactcaaaa

SEQ ID NO: 292 - RNA, 21 nt, synthetic construct
  source 1..21: mol_type = other RNA
  modified_base 1: mod_base = OTHER; note = 2'-O-methyluridine-3'-phosphorothioate
  modified_base 2: mod_base = OTHER; note = 2'-O-methyluridine-3'-phosphorothioate
  modified_base 3: mod_base = OTHER; note = 2'-O-methyluridine-3'-phosphate
  modified_base 4: mod_base = OTHER; note = 2'-O-methylcytidine-3'-phosphate
  modified_base 5: mod_base = OTHER; note = 2'-O-methyluridine-3'-phosphate
  modified_base 6: mod_base = OTHER; note = 2'-O-methylguanosine-3'-phosphate
  modified_base 7: mod_base = OTHER; note = 2'-deoxy-2'-fluoroguanosine-3'-phosphate
  modified_base 8: mod_base = OTHER; note = 2'-O-methylguanosine-3'-phosphate
  modified_base 9: mod_base = OTHER; note = 2'-deoxy-2'-fluoroadenosine-3'-phosphate
  modified_base 10: mod_base = OTHER; note = 2'-deoxy-2'-fluorouridine-3'-phosphate
  modified_base 11: mod_base = OTHER; note = 2'-deoxy-2'-fluoroadenosine-3'-phosphate
  modified_base 12: mod_base = OTHER; note = 2'-O-methyladenosine-3'-phosphate
  modified_base 13: mod_base = OTHER; note = 2'-O-methylcytidine-3'-phosphate
  modified_base 14: mod_base = OTHER; note = 2'-O-methyluridine-3'-phosphate
  modified_base 15: mod_base = OTHER; note = 2'-O-methylcytidine-3'-phosphate
  modified_base 16: mod_base = OTHER; note = 2'-O-methyladenosine-3'-phosphate
  modified_base 17: mod_base = OTHER; note = 2'-O-methyladenosine-3'-phosphate
  modified_base 18: mod_base = OTHER; note = 2'-O-methyladenosine-3'-phosphate
  modified_base 19: mod_base = OTHER; note = 2'-O-methylguanosine-3'-phosphate
  modified_base 20: mod_base = OTHER; note = 2'-O-methylguanosine-3'-phosphate
  modified_base 21: mod_base = OTHER; note = 2'-O-methyladenosine-3'-phosphate ((2S,4R)-1-[29-[[2-(acetylamino)-2-deoxy-beta-D-galactopyra nosyl]oxy]-14,14-bis[[3-[[3-[[5-[[2-(acetylamino)-2-deoxy-b eta-D-galactopyranosyl]oxy]-1-oxopentyl]amino]propyl]amino] -3-oxopropoxy]methyl]-1,12,19,25-tetraoxo-16-oxa-13,20,24-t riazanonacos-1-yl]-4-hydroxy-2-pyrrolidinyl)methyl ester
tttctgggataactcaaagga

SEQ ID NO: 293 - RNA, 21 nt, synthetic construct
  source 1..21: mol_type = other RNA
  modified_base 1: mod_base = OTHER; note = 2'-O-methylcytidine-3'-phosphorothioate
  modified_base 2: mod_base = OTHER; note = 2'-O-methyluridine-3'-phosphorothioate
  modified_base 3: mod_base = OTHER; note = 2'-O-methylguanosine-3'-phosphate
  modified_base 4: mod_base = OTHER; note = 2'-O-methylcytidine-3'-phosphate
  modified_base 5: mod_base = OTHER; note = 2'-O-methyluridine-3'-phosphate
  modified_base 6: mod_base = OTHER; note = 2'-O-methyladenosine-3'-phosphate
  modified_base 7: mod_base = OTHER; note = 2'-deoxy-2'-fluorouridine-3'-phosphate
  modified_base 8: mod_base = OTHER; note = 2'-O-methylcytidine-3'-phosphate
  modified_base 9: mod_base = OTHER; note = 2'-deoxy-2'-fluorouridine-3'-phosphate
  modified_base 10: mod_base = OTHER; note = 2'-deoxy-2'-fluoroadenosine-3'-phosphate
  modified_base 11: mod_base = OTHER; note = 2'-deoxy-2'-fluorocytidine-3'-phosphate
  modified_base 12: mod_base = OTHER; note = 2'-O-methylcytidine-3'-phosphate
  modified_base 13: mod_base = OTHER; note = 2'-O-methyladenosine-3'-phosphate
  modified_base 14: mod_base = OTHER; note = 2'-O-methylcytidine-3'-phosphate
  modified_base 15: mod_base = OTHER; note = 2'-O-methyladenosine-3'-phosphate
  modified_base 16: mod_base = OTHER; note = 2'-O-methyladenosine-3'-phosphate
  modified_base 17: mod_base = OTHER; note = 2'-O-methyladenosine-3'-phosphate
  modified_base 18: mod_base = OTHER; note = 2'-O-methyluridine-3'-phosphate
  modified_base 19: mod_base = OTHER; note = 2'-O-methyladenosine-3'-phosphate
  modified_base 20: mod_base = OTHER; note = 2'-O-methyluridine-3'-phosphate
  modified_base 21: mod_base = OTHER; note = 2'-O-methyladenosine-3'-phosphate ((2S,4R)-1-[29-[[2-(acetylamino)-2-deoxy-beta-D-galactopyra nosyl]oxy]-14,14-bis[[3-[[3-[[5-[[2-(acetylamino)-2-deoxy-b eta-D-galactopyranosyl]oxy]-1-oxopentyl]amino]propyl]amino] -3-oxopropoxy]methyl]-1,12,19,25-tetraoxo-16-oxa-13,20,24-t riazanonacos-1-yl]-4-hydroxy-2-pyrrolidinyl)methyl ester
ctgctatctaccacaaatata

SEQ ID NO: 294 - RNA, 21 nt, synthetic construct
  source 1..21: mol_type = other RNA
  modified_base 1: mod_base = OTHER; note = 2'-O-methyluridine-3'-phosphorothioate
  modified_base 2: mod_base = OTHER; note = 2'-O-methylguanosine-3'-phosphorothioate
  modified_base 3: mod_base = OTHER; note = 2'-O-methylcytidine-3'-phosphate
  modified_base 4: mod_base = OTHER; note = 2'-O-methyluridine-3'-phosphate
  modified_base 5: mod_base = OTHER; note = 2'-O-methyladenosine-3'-phosphate
  modified_base 6: mod_base = OTHER; note = 2'-O-methyluridine-3'-phosphate
  modified_base 7: mod_base = OTHER; note = 2'-deoxy-2'-fluorocytidine-3'-phosphate
  modified_base 8: mod_base = OTHER; note = 2'-O-methyluridine-3'-phosphate
  modified_base 9: mod_base = OTHER; note = 2'-deoxy-2'-fluoroadenosine-3'-phosphate
  modified_base 10: mod_base = OTHER; note = 2'-deoxy-2'-fluorocytidine-3'-phosphate
  modified_base 11: mod_base = OTHER; note = 2'-deoxy-2'-fluorocytidine-3'-phosphate
  modified_base 12: mod_base = OTHER; note = 2'-O-methyladenosine-3'-phosphate
  modified_base 13: mod_base = OTHER; note = 2'-O-methylcytidine-3'-phosphate
  modified_base 14: mod_base = OTHER; note = 2'-O-methyladenosine-3'-phosphate
  modified_base 15: mod_base = OTHER; note = 2'-O-methyladenosine-3'-phosphate
  modified_base 16: mod_base = OTHER; note = 2'-O-methyladenosine-3'-phosphate
  modified_base 17: mod_base = OTHER; note = 2'-O-methyluridine-3'-phosphate
  modified_base 18: mod_base = OTHER; note = 2'-O-methyladenosine-3'-phosphate
  modified_base 19: mod_base = OTHER; note = 2'-O-methyluridine-3'-phosphate
  modified_base 20: mod_base = OTHER; note = 2'-O-methyluridine-3'-phosphate
  modified_base 21: mod_base = OTHER; note = 2'-O-methyladenosine-3'-phosphate ((2S,4R)-1-[29-[[2-(acetylamino)-2-deoxy-beta-D-galactopyra nosyl]oxy]-14,14-bis[[3-[[3-[[5-[[2-(acetylamino)-2-deoxy-b eta-D-galactopyranosyl]oxy]-1-oxopentyl]amino]propyl]amino] -3-oxopropoxy]methyl]-1,12,19,25-tetraoxo-16-oxa-13,20,24-t riazanonacos-1-yl]-4-hydroxy-2-pyrrolidinyl)methyl ester
tgctatctaccacaaatatta

SEQ ID NO: 295 - RNA, 21 nt, synthetic construct
  source 1..21: mol_type = other RNA
  modified_base 1: mod_base = OTHER; note = 2'-O-methylcytidine-3'-phosphorothioate
  modified_base 2: mod_base = OTHER; note = 2'-O-methyluridine-3'-phosphorothioate
  modified_base 3: mod_base = OTHER; note = 2'-O-methyladenosine-3'-phosphate
  modified_base 4: mod_base = OTHER; note = 2'-O-methylcytidine-3'-phosphate
  modified_base 5: mod_base = OTHER; note = 2'-O-methylcytidine-3'-phosphate
  modified_base 6: mod_base = OTHER; note = 2'-O-methyladenosine-3'-phosphate
  modified_base 7: mod_base = OTHER; note = 2'-deoxy-2'-fluorocytidine-3'-phosphate
  modified_base 8: mod_base = OTHER; note = 2'-O-methyladenosine-3'-phosphate
  modified_base 9: mod_base = OTHER; note = 2'-deoxy-2'-fluoroadenosine-3'-phosphate
  modified_base 10: mod_base = OTHER; note = 2'-deoxy-2'-fluoroadenosine-3'-phosphate
  modified_base 11: mod_base = OTHER; note = 2'-deoxy-2'-fluorouridine-3'-phosphate
  modified_base 12: mod_base = OTHER; note = 2'-O-methyladenosine-3'-phosphate
  modified_base 13: mod_base = OTHER; note = 2'-O-methyluridine-3'-phosphate
  modified_base 14: mod_base = OTHER; note = 2'-O-methyluridine-3'-phosphate
  modified_base 15: mod_base = OTHER; note = 2'-O-methyladenosine-3'-phosphate
  modified_base 16: mod_base = OTHER; note = 2'-O-methyluridine-3'-phosphate
  modified_base 17: mod_base = OTHER; note = 2'-O-methylcytidine-3'-phosphate
  modified_base 18: mod_base = OTHER; note = 2'-O-methyladenosine-3'-phosphate
  modified_base 19: mod_base = OTHER; note = 2'-O-methylcytidine-3'-phosphate
  modified_base 20: mod_base = OTHER; note = 2'-O-methyluridine-3'-phosphate
  modified_base 21: mod_base = OTHER; note = 2'-O-methyladenosine-3'-phosphate ((2S,4R)-1-[29-[[2-(acetylamino)-2-deoxy-beta-D-galactopyra nosyl]oxy]-14,14-bis[[3-[[3-[[5-[[2-(acetylamino)-2-deoxy-b eta-D-galactopyranosyl]oxy]-1-oxopentyl]amino]propyl]amino] -3-oxopropoxy]methyl]-1,12,19,25-tetraoxo-16-oxa-13,20,24-t riazanonacos-1-yl]-4-hydroxy-2-pyrrolidinyl)methyl ester
ctaccacaaatattatcacta

SEQ ID NO: 296 - RNA, 21 nt, synthetic construct
  source 1..21: mol_type = other RNA
  modified_base 1: mod_base = OTHER; note = 2'-O-methyluridine-3'-phosphorothioate
  modified_base 2: mod_base = OTHER; note = 2'-O-methyladenosine-3'-phosphorothioate
  modified_base 3: mod_base = OTHER; note = 2'-O-methylcytidine-3'-phosphate
  modified_base 4: mod_base = OTHER; note = 2'-O-methylcytidine-3'-phosphate
  modified_base 5: mod_base = OTHER; note = 2'-O-methyladenosine-3'-phosphate
  modified_base 6: mod_base = OTHER; note = 2'-O-methylcytidine-3'-phosphate
  modified_base 7: mod_base = OTHER; note = 2'-deoxy-2'-fluoroadenosine-3'-phosphate
  modified_base 8: mod_base = OTHER; note = 2'-O-methyladenosine-3'-phosphate
  modified_base 9: mod_base = OTHER; note = 2'-deoxy-2'-fluoroadenosine-3'-phosphate
  modified_base 10: mod_base = OTHER; note = 2'-deoxy-2'-fluorouridine-3'-phosphate
  modified_base 11: mod_base = OTHER; note = 2'-deoxy-2'-fluoroadenosine-3'-phosphate
  modified_base 12: mod_base = OTHER; note = 2'-O-methyluridine-3'-phosphate
  modified_base 13: mod_base = OTHER; note = 2'-O-methyluridine-3'-phosphate
  modified_base 14: mod_base = OTHER; note = 2'-O-methyladenosine-3'-phosphate
  modified_base 15: mod_base = OTHER; note = 2'-O-methyluridine-3'-phosphate
  modified_base 16: mod_base = OTHER; note = 2'-O-methylcytidine-3'-phosphate
  modified_base 17: mod_base = OTHER; note = 2'-O-methyladenosine-3'-phosphate
  modified_base 18: mod_base = OTHER; note = 2'-O-methylcytidine-3'-phosphate
  modified_base 19: mod_base = OTHER; note = 2'-O-methyluridine-3'-phosphate
  modified_base 20: mod_base = OTHER; note = 2'-O-methyladenosine-3'-phosphate
  modified_base 21: mod_base = OTHER; note = 2'-O-methyladenosine-3'-phosphate ((2S,4R)-1-[29-[[2-(acetylamino)-2-deoxy-beta-D-galactopyra nosyl]oxy]-14,14-bis[[3-[[3-[[5-[[2-(acetylamino)-2-deoxy-b eta-D-galactopyranosyl]oxy]-1-oxopentyl]amino]propyl]amino] -3-oxopropoxy]methyl]-1,12,19,25-tetraoxo-16-oxa-13,20,24-t riazanonacos-1-yl]-4-hydroxy-2-pyrrolidinyl)methyl ester
taccacaaatattatcactaa

SEQ ID NO: 297 - RNA, 21 nt, synthetic construct
  source 1..21: mol_type = other RNA
  modified_base 1: mod_base = OTHER; note = 2'-O-methyladenosine-3'-phosphorothioate
  modified_base 2: mod_base = OTHER; note = 2'-O-methylcytidine-3'-phosphorothioate
  modified_base 3: mod_base = OTHER; note = 2'-O-methylcytidine-3'-phosphate
  modified_base 4: mod_base = OTHER; note = 2'-O-methyladenosine-3'-phosphate
  modified_base 5: mod_base = OTHER; note = 2'-O-methylcytidine-3'-phosphate
  modified_base 6: mod_base = OTHER; note = 2'-O-methyladenosine-3'-phosphate
  modified_base 7: mod_base = OTHER; note = 2'-deoxy-2'-fluoroadenosine-3'-phosphate
  modified_base 8: mod_base = OTHER; note = 2'-O-methyladenosine-3'-phosphate
  modified_base 9: mod_base = OTHER; note = 2'-deoxy-2'-fluorouridine-3'-phosphate
  modified_base 10: mod_base = OTHER; note = 2'-deoxy-2'-fluoroadenosine-3'-phosphate
  modified_base 11: mod_base = OTHER; note = 2'-deoxy-2'-fluorouridine-3'-phosphate
  modified_base 12: mod_base = OTHER; note = 2'-O-methyluridine-3'-phosphate
  modified_base 13: mod_base = OTHER; note = 2'-O-methyladenosine-3'-phosphate
  modified_base 14: mod_base = OTHER; note = 2'-O-methyluridine-3'-phosphate
  modified_base 15: mod_base = OTHER; note = 2'-O-methylcytidine-3'-phosphate
  modified_base 16: mod_base = OTHER; note = 2'-O-methyladenosine-3'-phosphate
  modified_base 17: mod_base = OTHER; note = 2'-O-methylcytidine-3'-phosphate
  modified_base 18: mod_base = OTHER; note = 2'-O-methyluridine-3'-phosphate
  modified_base 19: mod_base = OTHER; note = 2'-O-methyladenosine-3'-phosphate
  modified_base 20: mod_base = OTHER; note = 2'-O-methylcytidine-3'-phosphate
  modified_base 21: mod_base = OTHER; note = 2'-O-methyladenosine-3'-phosphate ((2S,4R)-1-[29-[[2-(acetylamino)-2-deoxy-beta-D-galactopyra nosyl]oxy]-14,14-bis[[3-[[3-[[5-[[2-(acetylamino)-2-deoxy-b eta-D-galactopyranosyl]oxy]-1-oxopentyl]amino]propyl]amino] -3-oxopropoxy]methyl]-1,12,19,25-tetraoxo-16-oxa-13,20,24-t riazanonacos-1-yl]-4-hydroxy-2-pyrrolidinyl)methyl ester
accacaaatattatcactaca

SEQ ID NO: 298 - RNA, 21 nt, synthetic construct
  source 1..21: mol_type = other RNA
  modified_base 1: mod_base = OTHER; note = 2'-O-methylcytidine-3'-phosphorothioate
  modified_base 2: mod_base = OTHER; note = 2'-O-methyladenosine-3'-phosphorothioate
  modified_base 3: mod_base = OTHER; note = 2'-O-methylcytidine-3'-phosphate
  modified_base 4: mod_base = OTHER; note = 2'-O-methyladenosine-3'-phosphate
  modified_base 5: mod_base = OTHER; note = 2'-O-methyladenosine-3'-phosphate
  modified_base 6: mod_base = OTHER; note = 2'-O-methyladenosine-3'-phosphate
  modified_base 7: mod_base = OTHER; note = 2'-deoxy-2'-fluorouridine-3'-phosphate
  modified_base 8: mod_base = OTHER; note = 2'-O-methyladenosine-3'-phosphate
  modified_base 9: mod_base = OTHER; note = 2'-deoxy-2'-fluorouridine-3'-phosphate
  modified_base 10: mod_base = OTHER; note = 2'-deoxy-2'-fluorouridine-3'-phosphate
  modified_base 11: mod_base = OTHER; note = 2'-deoxy-2'-fluoroadenosine-3'-phosphate
  modified_base 12: mod_base = OTHER; note = 2'-O-methyluridine-3'-phosphate
  modified_base 13: mod_base = OTHER; note = 2'-O-methylcytidine-3'-phosphate
  modified_base 14: mod_base = OTHER; note = 2'-O-methyladenosine-3'-phosphate
  modified_base 15: mod_base = OTHER; note = 2'-O-methylcytidine-3'-phosphate
  modified_base 16: mod_base = OTHER; note = 2'-O-methyluridine-3'-phosphate
  modified_base 17: mod_base = OTHER; note = 2'-O-methyladenosine-3'-phosphate
  modified_base 18: mod_base = OTHER; note = 2'-O-methylcytidine-3'-phosphate
  modified_base 19: mod_base = OTHER; note = 2'-O-methylcytidine-3'-phosphate
  modified_base 20: mod_base = OTHER; note = 2'-O-methyluridine-3'-phosphate
  modified_base 21: mod_base = OTHER; note = 2'-O-methyladenosine-3'-phosphate ((2S,4R)-1-[29-[[2-(acetylamino)-2-deoxy-beta-D-galactopyra nosyl]oxy]-14,14-bis[[3-[[3-[[5-[[2-(acetylamino)-2-deoxy-b eta-D-galactopyranosyl]oxy]-1-oxopentyl]amino]propyl]amino] -3-oxopropoxy]methyl]-1,12,19,25-tetraoxo-16-oxa-13,20,24-t riazanonacos-1-yl]-4-hydroxy-2-pyrrolidinyl)methyl ester
cacaaatattatcactaccta

SEQ ID NO: 299 - RNA, 21 nt, synthetic construct
  source 1..21: mol_type = other RNA
  modified_base 1: mod_base = OTHER; note = 2'-O-methyluridine-3'-phosphorothioate
  modified_base 2: mod_base = OTHER; note = 2'-O-methyladenosine-3'-phosphorothioate
  modified_base 3: mod_base = OTHER; note = 2'-O-methyluridine-3'-phosphate
  modified_base 4: mod_base = OTHER; note = 2'-O-methylcytidine-3'-phosphate
  modified_base 5: mod_base = OTHER; note = 2'-O-methyladenosine-3'-phosphate
  modified_base 6: mod_base = OTHER; note = 2'-O-methylcytidine-3'-phosphate
  modified_base 7: mod_base = OTHER; note = 2'-deoxy-2'-fluorouridine-3'-phosphate
  modified_base 8: mod_base = OTHER; note = 2'-O-methyladenosine-3'-phosphate
  modified_base 9: mod_base = OTHER; note = 2'-deoxy-2'-fluorocytidine-3'-phosphate
  modified_base 10: mod_base = OTHER; note = 2'-deoxy-2'-fluorocytidine-3'-phosphate
  modified_base 11: mod_base = OTHER; note = 2'-deoxy-2'-fluorouridine-3'-phosphate
  modified_base 12: mod_base = OTHER; note = 2'-O-methylguanosine-3'-phosphate
  modified_base 13: mod_base = OTHER; note = 2'-O-methyluridine-3'-phosphate
  modified_base 14: mod_base = OTHER; note = 2'-O-methyladenosine-3'-phosphate
  modified_base 15: mod_base = OTHER; note = 2'-O-methyluridine-3'-phosphate
  modified_base 16: mod_base = OTHER; note = 2'-O-methyluridine-3'-phosphate
  modified_base 17: mod_base = OTHER; note = 2'-O-methylcytidine-3'-phosphate
  modified_base 18: mod_base = OTHER; note = 2'-O-methylcytidine-3'-phosphate
  modified_base 19: mod_base = OTHER; note = 2'-O-methylcytidine-3'-phosphate
  modified_base 20: mod_base = OTHER; note = 2'-O-methyladenosine-3'-phosphate
  modified_base 21: mod_base = OTHER; note = 2'-O-methyladenosine-3'-phosphate ((2S,4R)-1-[29-[[2-(acetylamino)-2-deoxy-beta-D-galactopyra nosyl]oxy]-14,14-bis[[3-[[3-[[5-[[2-(acetylamino)-2-deoxy-b eta-D-galactopyranosyl]oxy]-1-oxopentyl]amino]propyl]amino] -3-oxopropoxy]methyl]-1,12,19,25-tetraoxo-16-oxa-13,20,24-t riazanonacos-1-yl]-4-hydroxy-2-pyrrolidinyl)methyl ester
tatcactacctgtattcccaa

SEQ ID NO: 300 - RNA, 21 nt, synthetic construct
  source 1..21: mol_type = other RNA
  modified_base 1: mod_base = OTHER; note = 2'-O-methyladenosine-3'-phosphorothioate
  modified_base 2: mod_base = OTHER; note = 2'-O-methyluridine-3'-phosphorothioate
  modified_base 3: mod_base = OTHER; note = 2'-O-methylcytidine-3'-phosphate
  modified_base 4: mod_base = OTHER; note = 2'-O-methyladenosine-3'-phosphate
  modified_base 5: mod_base = OTHER; note = 2'-O-methylcytidine-3'-phosphate
  modified_base 6: mod_base = OTHER; note = 2'-O-methyluridine-3'-phosphate
  modified_base 7: mod_base = OTHER; note = 2'-deoxy-2'-fluoroadenosine-3'-phosphate
  modified_base 8: mod_base = OTHER; note = 2'-O-methylcytidine-3'-phosphate
  modified_base 9: mod_base = OTHER; note = 2'-deoxy-2'-fluorocytidine-3'-phosphate
  modified_base 10: mod_base = OTHER; note = 2'-deoxy-2'-fluorouridine-3'-phosphate
  modified_base 11: mod_base = OTHER; note = 2'-deoxy-2'-fluoroguanosine-3'-phosphate
  modified_base 12: mod_base = OTHER; note = 2'-O-methyluridine-3'-phosphate
  modified_base 13: mod_base = OTHER; note = 2'-O-methyladenosine-3'-phosphate
  modified_base 14: mod_base = OTHER; note = 2'-O-methyluridine-3'-phosphate
  modified_base 15: mod_base = OTHER; note = 2'-O-methyluridine-3'-phosphate
  modified_base 16: mod_base = OTHER; note = 2'-O-methylcytidine-3'-phosphate
  modified_base 17: mod_base = OTHER; note = 2'-O-methylcytidine-3'-phosphate
  modified_base 18: mod_base = OTHER; note = 2'-O-methylcytidine-3'-phosphate
  modified_base 19: mod_base = OTHER; note = 2'-O-methyladenosine-3'-phosphate
  modified_base 20: mod_base = OTHER; note = 2'-O-methyluridine-3'-phosphate
  modified_base 21: mod_base = OTHER; note = 2'-O-methyladenosine-3'-phosphate ((2S,4R)-1-[29-[[2-(acetylamino)-2-deoxy-beta-D-galactopyra nosyl]oxy]-14,14-bis[[3-[[3-[[5-[[2-(acetylamino)-2-deoxy-b eta-D-galactopyranosyl]oxy]-1-oxopentyl]amino]propyl]amino] -3-oxopropoxy]methyl]-1,12,19,25-tetraoxo-16-oxa-13,20,24-t riazanonacos-1-yl]-4-hydroxy-2-pyrrolidinyl)methyl ester
atcactacctgtattcccata

SEQ ID NO: 301 - RNA, 21 nt, synthetic construct
  source 1..21: mol_type = other RNA
  modified_base 1: mod_base = OTHER; note = 2'-O-methylcytidine-3'-phosphorothioate
  modified_base 2: mod_base = OTHER; note = 2'-O-methyladenosine-3'-phosphorothioate
  modified_base 3: mod_base = OTHER; note = 2'-O-methylcytidine-3'-phosphate
  modified_base 4: mod_base = OTHER; note = 2'-O-methyluridine-3'-phosphate
  modified_base 5: mod_base = OTHER; note = 2'-O-methyladenosine-3'-phosphate
  modified_base 6: mod_base = OTHER; note = 2'-O-methylcytidine-3'-phosphate
  modified_base 7: mod_base = OTHER; note = 2'-deoxy-2'-fluorocytidine-3'-phosphate
  modified_base 8: mod_base = OTHER; note = 2'-O-methyluridine-3'-phosphate
  modified_base 9: mod_base = OTHER; note = 2'-deoxy-2'-fluoroguanosine-3'-phosphate
  modified_base 10: mod_base = OTHER; note = 2'-deoxy-2'-fluorouridine-3'-phosphate
  modified_base 11: mod_base = OTHER; note = 2'-deoxy-2'-fluoroadenosine-3'-phosphate
  modified_base 12: mod_base = OTHER; note = 2'-O-methyluridine-3'-phosphate
  modified_base 13: mod_base = OTHER; note = 2'-O-methyluridine-3'-phosphate
  modified_base 14: mod_base = OTHER; note = 2'-O-methylcytidine-3'-phosphate
  modified_base 15: mod_base = OTHER; note = 2'-O-methylcytidine-3'-phosphate
  modified_base 16: mod_base = OTHER; note = 2'-O-methylcytidine-3'-phosphate
  modified_base 17: mod_base = OTHER; note = 2'-O-methyladenosine-3'-phosphate
  modified_base 18: mod_base = OTHER; note = 2'-O-methyluridine-3'-phosphate
  modified_base 19: mod_base = OTHER; note = 2'-O-methyluridine-3'-phosphate
  modified_base 20: mod_base = OTHER; note = 2'-O-methyladenosine-3'-phosphate
  modified_base 21: mod_base = OTHER; note = 2'-O-methyladenosine-3'-phosphate ((2S,4R)-1-[29-[[2-(acetylamino)-2-deoxy-beta-D-galactopyra nosyl]oxy]-14,14-bis[[3-[[3-[[5-[[2-(acetylamino)-2-deoxy-b eta-D-galactopyranosyl]oxy]-1-oxopentyl]amino]propyl]amino] -3-oxopropoxy]methyl]-1,12,19,25-tetraoxo-16-oxa-13,20,24-t riazanonacos-1-yl]-4-hydroxy-2-pyrrolidinyl)methyl ester
cactacctgtattcccattaa

SEQ ID NO: 302 - RNA, 21 nt, synthetic construct
  source 1..21: mol_type = other RNA
  modified_base 1: mod_base = OTHER; note = 2'-O-methyluridine-3'-phosphorothioate
  modified_base 2: mod_base = OTHER; note = 2'-O-methylguanosine-3'-phosphorothioate
  modified_base 3: mod_base = OTHER; note = 2'-O-methyladenosine-3'-phosphate
  modified_base 4: mod_base = OTHER; note = 2'-O-methylguanosine-3'-phosphate
  modified_base 5: mod_base = OTHER; note = 2'-O-methylguanosine-3'-phosphate
  modified_base 6: mod_base = OTHER; note = 2'-O-methyladenosine-3'-phosphate
  modified_base 7: mod_base = OTHER; note = 2'-deoxy-2'-fluorocytidine-3'-phosphate
  modified_base 8: mod_base = OTHER; note = 2'-O-methyladenosine-3'-phosphate
  modified_base 9: mod_base = OTHER; note = 2'-deoxy-2'-fluorouridine-3'-phosphate
  modified_base 10: mod_base = OTHER; note = 2'-deoxy-2'-fluorouridine-3'-phosphate
  modified_base 11: mod_base = OTHER; note = 2'-deoxy-2'-fluorocytidine-3'-phosphate
  modified_base 12: mod_base = OTHER; note = 2'-O-methyluridine-3'-phosphate
  modified_base 13: mod_base = OTHER; note = 2'-O-methylcytidine-3'-phosphate
  modified_base 14: mod_base = OTHER; note = 2'-O-methyladenosine-3'-phosphate
  modified_base 15: mod_base = OTHER; note = 2'-O-methyluridine-3'-phosphate
  modified_base 16: mod_base = OTHER; note = 2'-O-methylguanosine-3'-phosphate
  modified_base 17: mod_base = OTHER; note = 2'-O-methyladenosine-3'-phosphate
  modified_base 18: mod_base = OTHER; note = 2'-O-methyladenosine-3'-phosphate
  modified_base 19: mod_base = OTHER; note = 2'-O-methyluridine-3'-phosphate
  modified_base 20: mod_base = OTHER; note = 2'-O-methyluridine-3'-phosphate
  modified_base 21: mod_base = OTHER; note = 2'-O-methyladenosine-3'-phosphate ((2S,4R)-1-[29-[[2-(acetylamino)-2-deoxy-beta-D-galactopyra nosyl]oxy]-14,14-bis[[3-[[3-[[5-[[2-(acetylamino)-2-deoxy-b eta-D-galactopyranosyl]oxy]-1-oxopentyl]amino]propyl]amino] -3-oxopropoxy]methyl]-1,12,19,25-tetraoxo-16-oxa-13,20,24-t riazanonacos-1-yl]-4-hydroxy-2-pyrrolidinyl)methyl ester
tgaggacattctcatgaatta

SEQ ID NO: 303 - RNA, 21 nt, synthetic construct
  source 1..21: mol_type = other RNA
  modified_base 1: mod_base = OTHER; note = 2'-O-methylguanosine-3'-phosphorothioate
  modified_base 2: mod_base = OTHER; note = 2'-O-methyladenosine-3'-phosphorothioate
  modified_base 3: mod_base = OTHER; note = 2'-O-methylguanosine-3'-phosphate
  modified_base 4: mod_base = OTHER; note = 2'-O-methylguanosine-3'-phosphate
  modified_base 5: mod_base = OTHER; note = 2'-O-methyladenosine-3'-phosphate
  modified_base 6: mod_base = OTHER; note = 2'-O-methylcytidine-3'-phosphate
  modified_base 7: mod_base = OTHER; note = 2'-deoxy-2'-fluoroadenosine-3'-phosphate
  modified_base 8: mod_base = OTHER; note = 2'-O-methyluridine-3'-phosphate
  modified_base 9: mod_base = OTHER; note = 2'-deoxy-2'-fluorouridine-3'-phosphate
  modified_base 10: mod_base = OTHER; note = 2'-deoxy-2'-fluorocytidine-3'-phosphate
  modified_base 11: mod_base = OTHER; note = 2'-deoxy-2'-fluorouridine-3'-phosphate
  modified_base 12: mod_base = OTHER; note = 2'-O-methylcytidine-3'-phosphate
  modified_base 13: mod_base = OTHER; note = 2'-O-methyladenosine-3'-phosphate
  modified_base 14: mod_base = OTHER; note = 2'-O-methyluridine-3'-phosphate
  modified_base 15: mod_base = OTHER; note = 2'-O-methylguanosine-3'-phosphate
  modified_base 16: mod_base = OTHER; note = 2'-O-methyladenosine-3'-phosphate
  modified_base 17: mod_base = OTHER; note = 2'-O-methyladenosine-3'-phosphate
  modified_base 18: mod_base = OTHER; note = 2'-O-methyluridine-3'-phosphate
  modified_base 19: mod_base = OTHER; note = 2'-O-methyluridine-3'-phosphate
  modified_base 20: mod_base = OTHER; note = 2'-O-methyluridine-3'-phosphate
  modified_base 21: mod_base = OTHER; note = 2'-O-methyladenosine-3'-phosphate ((2S,4R)-1-[29-[[2-(acetylamino)-2-deoxy-beta-D-galactopyra nosyl]oxy]-14,14-bis[[3-[[3-[[5-[[2-(acetylamino)-2-deoxy-b eta-D-galactopyranosyl]oxy]-1-oxopentyl]amino]propyl]amino] -3-oxopropoxy]methyl]-1,12,19,25-tetraoxo-16-oxa-13,20,24-t riazanonacos-1-yl]-4-hydroxy-2-pyrrolidinyl)methyl ester
gaggacattctcatgaattta

SEQ ID NO: 304 - RNA, 21 nt, synthetic construct
  source 1..21: mol_type = other RNA
  modified_base 1: mod_base = OTHER; note = 2'-O-methyladenosine-3'-phosphorothioate
  modified_base 2: mod_base = OTHER; note = 2'-O-methylguanosine-3'-phosphorothioate
  modified_base 3: mod_base = OTHER; note = 2'-O-methylguanosine-3'-phosphate
  modified_base 4: mod_base = OTHER; note = 2'-O-methyladenosine-3'-phosphate
  modified_base 5: mod_base = OTHER; note = 2'-O-methylcytidine-3'-phosphate
  modified_base 6: mod_base = OTHER; note = 2'-O-methyladenosine-3'-phosphate
  modified_base 7: mod_base = OTHER; note = 2'-deoxy-2'-fluorouridine-3'-phosphate
  modified_base 8: mod_base = OTHER; note = 2'-O-methyluridine-3'-phosphate
  modified_base 9: mod_base = OTHER; note = 2'-deoxy-2'-fluorocytidine-3'-phosphate
  modified_base 10: mod_base = OTHER; note = 2'-deoxy-2'-fluorouridine-3'-phosphate
  modified_base 11: mod_base = OTHER; note = 2'-deoxy-2'-fluorocytidine-3'-phosphate
  modified_base 12: mod_base = OTHER; note = 2'-O-methyladenosine-3'-phosphate
  modified_base 13: mod_base = OTHER; note = 2'-O-methyluridine-3'-phosphate
  modified_base 14: mod_base = OTHER; note = 2'-O-methylguanosine-3'-phosphate
  modified_base 15: mod_base = OTHER; note = 2'-O-methyladenosine-3'-phosphate
  modified_base 16: mod_base = OTHER; note = 2'-O-methyladenosine-3'-phosphate
  modified_base 17: mod_base = OTHER; note = 2'-O-methyluridine-3'-phosphate
  modified_base 18: mod_base = OTHER; note = 2'-O-methyluridine-3'-phosphate
  modified_base 19: mod_base = OTHER; note = 2'-O-methyluridine-3'-phosphate
  modified_base 20: mod_base = OTHER; note = 2'-O-methylcytidine-3'-phosphate
  modified_base 21: mod_base = OTHER; note = 2'-O-methyladenosine-3'-phosphate ((2S,4R)-1-[29-[[2-(acetylamino)-2-deoxy-beta-D-galactopyra nosyl]oxy]-14,14-bis[[3-[[3-[[5-[[2-(acetylamino)-2-deoxy-b eta-D-galactopyranosyl]oxy]-1-oxopentyl]amino]propyl]amino] -3-oxopropoxy]methyl]-1,12,19,25-tetraoxo-16-oxa-13,20,24-t riazanonacos-1-yl]-4-hydroxy-2-pyrrolidinyl)methyl ester
aggacattctcatgaatttca

SEQ ID NO: 305 - RNA, 21 nt, synthetic construct
  source 1..21: mol_type = other RNA
  modified_base 1: mod_base = OTHER; note = 2'-O-methylguanosine-3'-phosphorothioate
  modified_base 2: mod_base = OTHER; note = 2'-O-methylguanosine-3'-phosphorothioate
  modified_base 3: mod_base = OTHER; note = 2'-O-methyladenosine-3'-phosphate
  modified_base 4: mod_base = OTHER; note = 2'-O-methylcytidine-3'-phosphate
  modified_base 5: mod_base = OTHER; note = 2'-O-methyladenosine-3'-phosphate
  modified_base 6: mod_base = OTHER; note = 2'-O-methyluridine-3'-phosphate
  modified_base 7: mod_base = OTHER; note = 2'-deoxy-2'-fluorouridine-3'-phosphate
  modified_base 8: mod_base = OTHER; note = 2'-O-methylcytidine-3'-phosphate
  modified_base 9: mod_base = OTHER; note = 2'-deoxy-2'-fluorouridine-3'-phosphate
  modified_base 10: mod_base = OTHER; note = 2'-deoxy-2'-fluorocytidine-3'-phosphate
  modified_base 11: mod_base = OTHER; note = 2'-deoxy-2'-fluoroadenosine-3'-phosphate
  modified_base 12: mod_base = OTHER; note = 2'-O-methyluridine-3'-phosphate
  modified_base 13: mod_base = OTHER; note = 2'-O-methylguanosine-3'-phosphate
  modified_base 14: mod_base = OTHER; note = 2'-O-methyladenosine-3'-phosphate
  modified_base 15: mod_base = OTHER; note = 2'-O-methyladenosine-3'-phosphate
  modified_base 16: mod_base = OTHER; note = 2'-O-methyluridine-3'-phosphate
  modified_base 17: mod_base = OTHER; note = 2'-O-methyluridine-3'-phosphate
  modified_base 18: mod_base = OTHER; note = 2'-O-methyluridine-3'-phosphate
  modified_base 19: mod_base = OTHER; note = 2'-O-methylcytidine-3'-phosphate
  modified_base 20: mod_base = OTHER; note = 2'-O-methylcytidine-3'-phosphate
  modified_base 21: mod_base = OTHER; note = 2'-O-methyladenosine-3'-phosphate ((2S,4R)-1-[29-[[2-(acetylamino)-2-deoxy-beta-D-galactopyra nosyl]oxy]-14,14-bis[[3-[[3-[[5-[[2-(acetylamino)-2-deoxy-b eta-D-galactopyranosyl]oxy]-1-oxopentyl]amino]propyl]amino] -3-oxopropoxy]methyl]-1,12,19,25-tetraoxo-16-oxa-13,20,24-t riazanonacos-1-yl]-4-hydroxy-2-pyrrolidinyl)methyl ester
ggacattctcatgaatttcca

SEQ ID NO: 306 - RNA, 21 nt, synthetic construct
  source 1..21: mol_type = other RNA
  modified_base 1: mod_base = OTHER; note = 2'-O-methylguanosine-3'-phosphorothioate
  modified_base 2: mod_base = OTHER; note = 2'-O-methyluridine-3'-phosphorothioate
  modified_base 3: mod_base = OTHER; note = 2'-O-methylguanosine-3'-phosphate
  modified_base 4: mod_base = OTHER; note = 2'-O-methyladenosine-3'-phosphate
  modified_base 5: mod_base = OTHER; note = 2'-O-methylcytidine-3'-phosphate
  modified_base 6: mod_base = OTHER; note = 2'-O-methyladenosine-3'-phosphate
  modified_base 7: mod_base = OTHER; note = 2'-deoxy-2'-fluoroadenosine-3'-phosphate
  modified_base 8: mod_base = OTHER; note = 2'-O-methyladenosine-3'-phosphate
  modified_base 9: mod_base = OTHER; note = 2'-deoxy-2'-fluoroadenosine-3'-phosphate
  modified_base 10: mod_base = OTHER; note = 2'-deoxy-2'-fluorouridine-3'-phosphate
  modified_base 11: mod_base = OTHER; note = 2'-deoxy-2'-fluorouridine-3'-phosphate
  modified_base 12: mod_base = OTHER; note = 2'-O-methylguanosine-3'-phosphate
  modified_base 13: mod_base = OTHER; note = 2'-O-methylcytidine-3'-phosphate
  modified_base 14: mod_base = OTHER; note = 2'-O-methylcytidine-3'-phosphate
  modified_base 15: mod_base = OTHER; note = 2'-O-methyluridine-3'-phosphate
  modified_base 16: mod_base = OTHER; note = 2'-O-methylcytidine-3'-phosphate
  modified_base 17: mod_base = OTHER; note = 2'-O-methylcytidine-3'-phosphate
  modified_base 18: mod_base = OTHER; note = 2'-O-methyladenosine-3'-phosphate
  modified_base 19: mod_base = OTHER; note = 2'-O-methyladenosine-3'-phosphate
  modified_base 20: mod_base = OTHER; note = 2'-O-methyluridine-3'-phosphate
  modified_base 21: mod_base = OTHER; note = 2'-O-methyladenosine-3'-phosphate ((2S,4R)-1-[29-[[2-(acetylamino)-2-deoxy-beta-D-galactopyra nosyl]oxy]-14,14-bis[[3-[[3-[[5-[[2-(acetylamino)-2-deoxy-b eta-D-galactopyranosyl]oxy]-1-oxopentyl]amino]propyl]amino] -3-oxopropoxy]methyl]-1,12,19,25-tetraoxo-16-oxa-13,20,24-t riazanonacos-1-yl]-4-hydroxy-2-pyrrolidinyl)methyl ester
gtgacaaaattgcctccaata

SEQ ID NO: 307 - RNA, 21 nt, synthetic construct
  source 1..21: mol_type = other RNA
  modified_base 1: mod_base = OTHER; note = 2'-O-methylcytidine-3'-phosphorothioate
  modified_base 2: mod_base = OTHER; note = 2'-O-methyluridine-3'-phosphorothioate
  modified_base 3: mod_base = OTHER; note = 2'-O-methyluridine-3'-phosphate
  modified_base 4: mod_base = OTHER; note = 2'-O-methyluridine-3'-phosphate
  modified_base 5: mod_base = OTHER; note = 2'-O-methyladenosine-3'-phosphate
  modified_base 6: mod_base = OTHER; note = 2'-O-methyladenosine-3'-phosphate
  modified_base 7: mod_base = OTHER; note = 2'-deoxy-2'-fluoroadenosine-3'-phosphate
  modified_base 8: mod_base = OTHER; note = 2'-O-methylguanosine-3'-phosphate
  modified_base 9: mod_base = OTHER; note = 2'-deoxy-2'-fluoroadenosine-3'-phosphate
  modified_base 10: mod_base = OTHER; note = 2'-deoxy-2'-fluorocytidine-3'-phosphate
  modified_base 11: mod_base = OTHER; note = 2'-deoxy-2'-fluorocytidine-3'-phosphate
  modified_base 12: mod_base = OTHER; note = 2'-O-methyladenosine-3'-phosphate
  modified_base 13: mod_base = OTHER; note = 2'-O-methyladenosine-3'-phosphate
  modified_base 14: mod_base = OTHER; note = 2'-O-methylguanosine-3'-phosphate
  modified_base 15: mod_base = OTHER; note = 2'-O-methyluridine-3'-phosphate
  modified_base 16: mod_base = OTHER; note = 2'-O-methylcytidine-3'-phosphate
  modified_base 17: mod_base = OTHER; note = 2'-O-methyluridine-3'-phosphate
  modified_base 18: mod_base = OTHER; note = 2'-O-methylcytidine-3'-phosphate
  modified_base 19: mod_base = OTHER; note = 2'-O-methyladenosine-3'-phosphate
  modified_base 20: mod_base = OTHER; note = 2'-O-methyladenosine-3'-phosphate
  modified_base 21: mod_base = OTHER; note = 2'-O-methyladenosine-3'-phosphate ((2S,4R)-1-[29-[[2-(acetylamino)-2-deoxy-beta-D-galactopyra nosyl]oxy]-14,14-bis[[3-[[3-[[5-[[2-(acetylamino)-2-deoxy-b eta-D-galactopyranosyl]oxy]-1-oxopentyl]amino]propyl]amino] -3-oxopropoxy]methyl]-1,12,19,25-tetraoxo-16-oxa-13,20,24-t riazanonacos-1-yl]-4-hydroxy-2-pyrrolidinyl)methyl ester
ctttaaagaccaagtctcaaa

SEQ ID NO: 308 - RNA, 21 nt, synthetic construct
  source 1..21: mol_type = other RNA
  modified_base 1: mod_base = OTHER; note = 2'-O-methylcytidine-3'-phosphorothioate
  modified_base 2: mod_base = OTHER; note = 2'-O-methyladenosine-3'-phosphorothioate
  modified_base 3: mod_base = OTHER; note = 2'-O-methylguanosine-3'-phosphate
  modified_base 4: mod_base = OTHER; note = 2'-O-methyladenosine-3'-phosphate
  modified_base 5: mod_base = OTHER; note = 2'-O-methylguanosine-3'-phosphate
  modified_base 6: mod_base = OTHER; note = 2'-O-methyladenosine-3'-phosphate
  modified_base 7: mod_base = OTHER; note = 2'-deoxy-2'-fluorocytidine-3'-phosphate
  modified_base 8: mod_base = OTHER; note = 2'-O-methyladenosine-3'-phosphate
  modified_base 9: mod_base = OTHER; note = 2'-deoxy-2'-fluorouridine-3'-phosphate
  modified_base 10: mod_base = OTHER; note = 2'-deoxy-2'-fluorouridine-3'-phosphate
  modified_base 11: mod_base = OTHER; note = 2'-deoxy-2'-fluoroguanosine-3'-phosphate
  modified_base 12: mod_base = OTHER; note = 2'-O-methyladenosine-3'-phosphate
  modified_base 13: mod_base = OTHER; note = 2'-O-methyladenosine-3'-phosphate
  modified_base 14: mod_base = OTHER; note = 2'-O-methylcytidine-3'-phosphate
  modified_base 15: mod_base = OTHER; note = 2'-O-methylguanosine-3'-phosphate
  modified_base 16: mod_base = OTHER; note = 2'-O-methyladenosine-3'-phosphate
  modified_base 17: mod_base = OTHER; note = 2'-O-methylcytidine-3'-phosphate
  modified_base 18: mod_base = OTHER; note = 2'-O-methyluridine-3'-phosphate
  modified_base 19: mod_base = OTHER; note = 2'-O-methyluridine-3'-phosphate
  modified_base 20: mod_base = OTHER; note = 2'-O-methyluridine-3'-phosphate
  modified_base 21: mod_base = OTHER; note = 2'-O-methyladenosine-3'-phosphate ((2S,4R)-1-[29-[[2-(acetylamino)-2-deoxy-beta-D-galactopyra nosyl]oxy]-14,14-bis[[3-[[3-[[5-[[2-(acetylamino)-2-deoxy-b eta-D-galactopyranosyl]oxy]-1-oxopentyl]amino]propyl]amino] -3-oxopropoxy]methyl]-1,12,19,25-tetraoxo-16-oxa-13,20,24-t riazanonacos-1-yl]-4-hydroxy-2-pyrrolidinyl)methyl ester
cagagacattgaacgacttta

SEQ ID NO: 309 - RNA, 21 nt, synthetic construct
  source 1..21: mol_type = other RNA
  modified_base 1: mod_base = OTHER; note = 2'-O-methyladenosine-3'-phosphorothioate
  modified_base 2: mod_base = OTHER; note = 2'-O-methylguanosine-3'-phosphorothioate
  modified_base 3: mod_base = OTHER; note = 2'-O-methyladenosine-3'-phosphate
  modified_base 4: mod_base = OTHER; note = 2'-O-methylguanosine-3'-phosphate
  modified_base 5: mod_base = OTHER; note = 2'-O-methyladenosine-3'-phosphate
  modified_base 6: mod_base = OTHER; note = 2'-O-methylcytidine-3'-phosphate
  modified_base 7: mod_base = OTHER; note = 2'-deoxy-2'-fluoroadenosine-3'-phosphate
  modified_base 8: mod_base = OTHER; note = 2'-O-methyluridine-3'-phosphate
  modified_base 9: mod_base = OTHER; note = 2'-deoxy-2'-fluorouridine-3'-phosphate
  modified_base 10: mod_base = OTHER; note = 2'-deoxy-2'-fluoroguanosine-3'-phosphate
  modified_base 11: mod_base = OTHER; note = 2'-deoxy-2'-fluoroadenosine-3'-phosphate
  modified_base 12: mod_base = OTHER; note = 2'-O-methyladenosine-3'-phosphate
  modified_base 13: mod_base = OTHER; note = 2'-O-methylcytidine-3'-phosphate
  modified_base 14: mod_base = OTHER; note = 2'-O-methylguanosine-3'-phosphate
  modified_base 15: mod_base = OTHER; note = 2'-O-methyladenosine-3'-phosphate
  modified_base 16: mod_base = OTHER; note = 2'-O-methylcytidine-3'-phosphate
  modified_base 17: mod_base = OTHER; note = 2'-O-methyluridine-3'-phosphate
  modified_base 18: mod_base = OTHER; note = 2'-O-methyluridine-3'-phosphate
  modified_base 19: mod_base = OTHER; note = 2'-O-methyluridine-3'-phosphate
  modified_base 20: mod_base = OTHER; note = 2'-O-methylguanosine-3'-phosphate
  modified_base 21: mod_base = OTHER; note = 2'-O-methyladenosine-3'-phosphate ((2S,4R)-1-[29-[[2-(acetylamino)-2-deoxy-beta-D-galactopyra nosyl]oxy]-14,14-bis[[3-[[3-[[5-[[2-(acetylamino)-2-deoxy-b eta-D-galactopyranosyl]oxy]-1-oxopentyl]amino]propyl]amino] -3-oxopropoxy]methyl]-1,12,19,25-tetraoxo-16-oxa-13,20,24-t riazanonacos-1-yl]-4-hydroxy-2-pyrrolidinyl)methyl ester
agagacattgaacgactttga

SEQ ID NO: 310 - RNA, 21 nt, synthetic construct
  source 1..21: mol_type = other RNA
  modified_base 1: mod_base = OTHER; note = 2'-O-methyluridine-3'-phosphorothioate
  modified_base 2: mod_base = OTHER; note = 2'-O-methylguanosine-3'-phosphorothioate
  modified_base 3: mod_base = OTHER; note = 2'-O-methyladenosine-3'-phosphate
  modified_base 4: mod_base = OTHER; note = 2'-O-methyladenosine-3'-phosphate
  modified_base 5: mod_base = OTHER; note = 2'-O-methylcytidine-3'-phosphate
  modified_base 6: mod_base = OTHER; note = 2'-O-methyladenosine-3'-phosphate
  modified_base 7: mod_base = OTHER; note = 2'-deoxy-2'-fluorocytidine-3'-phosphate
  modified_base 8: mod_base = OTHER; note = 2'-O-methyladenosine-3'-phosphate
  modified_base 9: mod_base = OTHER; note = 2'-deoxy-2'-fluoroguanosine-3'-phosphate
  modified_base 10: mod_base = OTHER; note = 2'-deoxy-2'-fluorouridine-3'-phosphate
  modified_base 11: mod_base = OTHER; note = 2'-deoxy-2'-fluoroguanosine-3'-phosphate
  modified_base 12: mod_base = OTHER; note = 2'-O-methyladenosine-3'-phosphate
  modified_base 13: mod_base = OTHER; note = 2'-O-methylcytidine-3'-phosphate
  modified_base 14: mod_base = OTHER; note = 2'-O-methyladenosine-3'-phosphate
  modified_base 15: mod_base = OTHER; note = 2'-O-methyladenosine-3'-phosphate
  modified_base 16: mod_base = OTHER; note = 2'-O-methyladenosine-3'-phosphate
  modified_base 17: mod_base = OTHER; note = 2'-O-methyladenosine-3'-phosphate
  modified_base 18: mod_base = OTHER; note = 2'-O-methylcytidine-3'-phosphate
  modified_base 19: mod_base = OTHER; note = 2'-O-methyluridine-3'-phosphate
  modified_base 20: mod_base = OTHER; note = 2'-O-methylcytidine-3'-phosphate
  modified_base 21: mod_base = OTHER; note = 2'-O-methyladenosine-3'-phosphate ((2S,4R)-1-[29-[[2-(acetylamino)-2-deoxy-beta-D-galactopyra nosyl]oxy]-14,14-bis[[3-[[3-[[5-[[2-(acetylamino)-2-deoxy-b eta-D-galactopyranosyl]oxy]-1-oxopentyl]amino]propyl]amino] -3-oxopropoxy]methyl]-1,12,19,25-tetraoxo-16-oxa-13,20,24-t riazanonacos-1-yl]-4-hydroxy-2-pyrrolidinyl)methyl ester
tgaacacagtgacaaaactca

SEQ ID NO: 311 - RNA, 21 nt, synthetic construct
  source 1..21: mol_type = other RNA
  modified_base 1: mod_base = OTHER; note = 2'-O-methylguanosine-3'-phosphorothioate
  modified_base 2: mod_base = OTHER; note = 2'-O-methyladenosine-3'-phosphorothioate
  modified_base 3: mod_base = OTHER; note = 2'-O-methyladenosine-3'-phosphate
  modified_base 4: mod_base = OTHER; note = 2'-O-methylcytidine-3'-phosphate
  modified_base 5: mod_base = OTHER; note = 2'-O-methyladenosine-3'-phosphate
  modified_base 6: mod_base = OTHER; note = 2'-O-methylcytidine-3'-phosphate
  modified_base 7: mod_base = OTHER; note = 2'-deoxy-2'-fluoroadenosine-3'-phosphate
  modified_base 8: mod_base = OTHER; note = 2'-O-methylguanosine-3'-phosphate
  modified_base 9: mod_base = OTHER; note = 2'-deoxy-2'-fluorouridine-3'-phosphate
  modified_base 10: mod_base = OTHER; note = 2'-deoxy-2'-fluoroguanosine-3'-phosphate
  modified_base 11: mod_base = OTHER; note = 2'-deoxy-2'-fluoroadenosine-3'-phosphate
  modified_base 12: mod_base = OTHER; note = 2'-O-methylcytidine-3'-phosphate
  modified_base 13: mod_base = OTHER; note = 2'-O-methyladenosine-3'-phosphate
  modified_base 14: mod_base = OTHER; note = 2'-O-methyladenosine-3'-phosphate
  modified_base 15: mod_base = OTHER; note = 2'-O-methyladenosine-3'-phosphate
  modified_base 16: mod_base = OTHER; note = 2'-O-methyladenosine-3'-phosphate
  modified_base 17: mod_base = OTHER; note = 2'-O-methylcytidine-3'-phosphate
  modified_base 18: mod_base = OTHER; note = 2'-O-methyluridine-3'-phosphate
  modified_base 19: mod_base = OTHER; note = 2'-O-methylcytidine-3'-phosphate
  modified_base 20: mod_base = OTHER; note = 2'-O-methylguanosine-3'-phosphate
  modified_base 21: mod_base = OTHER; note = 2'-O-methyladenosine-3'-phosphate ((2S,4R)-1-[29-[[2-(acetylamino)-2-deoxy-beta-D-galactopyra nosyl]oxy]-14,14-bis[[3-[[3-[[5-[[2-(acetylamino)-2-deoxy-b eta-D-galactopyranosyl]oxy]-1-oxopentyl]amino]propyl]amino] -3-oxopropoxy]methyl]-1,12,19,25-tetraoxo-16-oxa-13,20,24-t riazanonacos-1-yl]-4-hydroxy-2-pyrrolidinyl)methyl ester
gaacacagtgacaaaactcga

SEQ ID NO: 312 - RNA, 21 nt, synthetic construct
  source 1..21: mol_type = other RNA
  modified_base 1: mod_base = OTHER; note = 2'-O-methylcytidine-3'-phosphorothioate
  modified_base 2: mod_base = OTHER; note = 2'-O-methyladenosine-3'-phosphorothioate
  modified_base 3: mod_base = OTHER; note = 2'-O-methyladenosine-3'-phosphate
  modified_base 4: mod_base = OTHER; note = 2'-O-methylcytidine-3'-phosphate
  modified_base 5: mod_base = OTHER; note = 2'-O-methyluridine-3'-phosphate
  modified_base 6: mod_base = OTHER; note = 2'-O-methyladenosine-3'-phosphate
  modified_base 7: mod_base = OTHER; note = 2'-deoxy-2'-fluoroguanosine-3'-phosphate
  modified_base 8: mod_base = OTHER; note = 2'-O-methylguanosine-3'-phosphate
  modified_base 9: mod_base = OTHER; note = 2'-deoxy-2'-fluorouridine-3'-phosphate
  modified_base 10: mod_base = OTHER; note = 2'-deoxy-2'-fluorouridine-3'-phosphate
  modified_base 11: mod_base = OTHER; note = 2'-deoxy-2'-fluoroguanosine-3'-phosphate
  modified_base 12: mod_base = OTHER; note = 2'-O-methyluridine-3'-phosphate
  modified_base 13: mod_base = OTHER; note = 2'-O-methylguanosine-3'-phosphate
  modified_base 14: mod_base = OTHER; note = 2'-O-methyluridine-3'-phosphate
  modified_base 15: mod_base = OTHER; note = 2'-O-methyladenosine-3'-phosphate
  modified_base 16: mod_base = OTHER; note = 2'-O-methylcytidine-3'-phosphate
  modified_base 17: mod_base = OTHER; note = 2'-O-methyladenosine-3'-phosphate
  modified_base 18: mod_base = OTHER; note = 2'-O-methylguanosine-3'-phosphate
  modified_base 19: mod_base = OTHER; note = 2'-O-methyluridine-3'-phosphate
  modified_base 20: mod_base = OTHER; note = 2'-O-methyluridine-3'-phosphate
  modified_base 21: mod_base = OTHER; note = 2'-O-methyladenosine-3'-phosphate ((2S,4R)-1-[29-[[2-(acetylamino)-2-deoxy-beta-D-galactopyra nosyl]oxy]-14,14-bis[[3-[[3-[[5-[[2-(acetylamino)-2-deoxy-b eta-D-galactopyranosyl]oxy]-1-oxopentyl]amino]propyl]amino] -3-oxopropoxy]methyl]-1,12,19,25-tetraoxo-16-oxa-13,20,24-t riazanonacos-1-yl]-4-hydroxy-2-pyrrolidinyl)methyl ester
caactaggttgtgtacagtta

SEQ ID NO: 313 - RNA, 21 nt, synthetic construct
  source 1..21: mol_type = other RNA
  modified_base 1: mod_base = OTHER; note = 2'-O-methylguanosine-3'-phosphorothioate
  modified_base 2: mod_base = OTHER; note = 2'-O-methyluridine-3'-phosphorothioate
  modified_base 3: mod_base = OTHER; note = 2'-O-methylguanosine-3'-phosphate
  modified_base 4: mod_base = OTHER; note = 2'-O-methyluridine-3'-phosphate
  modified_base 5: mod_base = OTHER; note = 2'-O-methyladenosine-3'-phosphate
  modified_base 6: mod_base = OTHER; note = 2'-O-methylcytidine-3'-phosphate
  modified_base 7: mod_base = OTHER; note = 2'-deoxy-2'-fluoroadenosine-3'-phosphate
  modified_base 8: mod_base = OTHER; note = 2'-O-methylguanosine-3'-phosphate
  modified_base 9: mod_base = OTHER; note = 2'-deoxy-2'-fluorouridine-3'-phosphate
  modified_base 10: mod_base = OTHER; note = 2'-deoxy-2'-fluorouridine-3'-phosphate
  modified_base 11: mod_base = OTHER; note = 2'-deoxy-2'-fluorouridine-3'-phosphate
  modified_base 12: mod_base = OTHER; note = 2'-O-methyladenosine-3'-phosphate
  modified_base 13: mod_base = OTHER; note = 2'-O-methyladenosine-3'-phosphate
  modified_base 14: mod_base = OTHER; note = 2'-O-methyluridine-3'-phosphate
  modified_base 15: mod_base = OTHER; note = 2'-O-methyluridine-3'-phosphate
  modified_base 16: mod_base = OTHER; note = 2'-O-methyladenosine-3'-phosphate
  modified_base 17: mod_base = OTHER; note = 2'-O-methyluridine-3'-phosphate
  modified_base 18: mod_base = OTHER; note = 2'-O-methylguanosine-3'-phosphate
  modified_base 19: mod_base = OTHER; note = 2'-O-methylguanosine-3'-phosphate
  modified_base 20: mod_base = OTHER; note = 2'-O-methyladenosine-3'-phosphate
  modified_base 21: mod_base = OTHER; note = 2'-O-methyladenosine-3'-phosphate ((2S,4R)-1-[29-[[2-(acetylamino)-2-deoxy-beta-D-galactopyra nosyl]oxy]-14,14-bis[[3-[[3-[[5-[[2-(acetylamino)-2-deoxy-b eta-D-galactopyranosyl]oxy]-1-oxopentyl]amino]propyl]amino] -3-oxopropoxy]methyl]-1,12,19,25-tetraoxo-16-oxa-13,20,24-t riazanonacos-1-yl]-4-hydroxy-2-pyrrolidinyl)methyl ester
gtgtacagtttaattatggaa

SEQ ID NO: 314 - RNA, 23 nt, synthetic construct
  source 1..23: mol_type = other RNA
  modified_base 1: mod_base = OTHER; note = 2'-O-methyluridine-3'-phosphorothioate 5'-(E)-Vinylphosphonate
  modified_base 2: mod_base = OTHER; note = 2'-deoxy-2'-fluoroadenosine-3'-phosphorothioate
  modified_base 3: mod_base = OTHER; note = 2'-O-methylguanosine-3'-phosphate
  modified_base 4: mod_base = OTHER; note = 2'-O-methylguanosine-3'-phosphate
  modified_base 5: mod_base = OTHER; note = 2'-O-methyladenosine-3'-phosphate
  modified_base 6: mod_base = OTHER; note = 2'-deoxy-2'-fluorouridine-3'-phosphate
  modified_base 7: mod_base = OTHER; note = 2'-O-methyluridine-3'-phosphate
  modified_base 8: mod_base = OTHER; note = 2'-deoxy-2'-fluoroguanosine-3'-phosphate
  modified_base 9: mod_base = OTHER; note = 2'-deoxy-2'-fluorouridine-3'-phosphate
  modified_base 10: mod_base = OTHER; note = 2'-O-methyladenosine-3'-phosphate
  modified_base 11: mod_base = OTHER; note = 2'-O-methyladenosine-3'-phosphate
  modified_base 12: mod_base = OTHER; note = 2'-O-methyladenosine-3'-phosphate
  modified_base 13: mod_base = OTHER; note = 2'-O-methyluridine-3'-phosphate
  modified_base 14: mod_base = OTHER; note = 2'-deoxy-2'-fluoroadenosine-3'-phosphate
  modified_base 15: mod_base = OTHER; note = 2'-O-methyladenosine-3'-phosphate
  modified_base 16: mod_base = OTHER; note = 2'-deoxy-2'-fluoroadenosine-3'-phosphate
  modified_base 17: mod_base = OTHER; note = 2'-O-methylcytidine-3'-phosphate
  modified_base 18: mod_base = OTHER; note = 2'-O-methyladenosine-3'-phosphate
  modified_base 19: mod_base = OTHER; note = 2'-O-methylcytidine-3'-phosphate
  modified_base 20: mod_base = OTHER; note = 2'-O-methyladenosine-3'-phosphate
  modified_base 21: mod_base = OTHER; note = 2'-O-methyladenosine-3'-phosphorothioate
  modified_base 22: mod_base = OTHER; note = 2'-O-methylguanosine-3'-phosphorothioate
  modified_base 23: mod_base = OTHER; note = 2'-O-methyladenosine
taggattgtaaataaacacaaga

SEQ ID NO: 315 - RNA, 23 nt, synthetic construct
  source 1..23: mol_type = other RNA
  modified_base 1: mod_base = OTHER; note = 2'-O-methyluridine-3'-phosphorothioate 5'-(E)-Vinylphosphonate
  modified_base 2: mod_base = OTHER; note = 2'-deoxy-2'-fluorouridine-3'-phosphorothioate
  modified_base 3: mod_base = OTHER; note = 2'-O-methylcytidine-3'-phosphate
  modified_base 4: mod_base = OTHER; note = 2'-O-methyladenosine-3'-phosphate
  modified_base 5: mod_base = OTHER; note = 2'-O-methyladenosine-3'-phosphate
  modified_base 6: mod_base = OTHER; note = 2'-deoxy-2'-fluoroguanosine-3'-phosphate
  modified_base 7: mod_base = OTHER; note = 2'-O-methyladenosine-3'-phosphate
  modified_base 8: mod_base = OTHER; note = 2'-deoxy-2'-fluoroguanosine-3'-phosphate
  modified_base 9: mod_base = OTHER; note = 2'-deoxy-2'-fluoroguanosine-3'-phosphate
  modified_base 10: mod_base = OTHER; note = 2'-O-methyladenosine-3'-phosphate
  modified_base 11: mod_base = OTHER; note = 2'-O-methyluridine-3'-phosphate
  modified_base 12: mod_base = OTHER; note = 2'-O-methyluridine-3'-phosphate
  modified_base 13: mod_base = OTHER; note = 2'-O-methylguanosine-3'-phosphate
  modified_base 14: mod_base = OTHER; note = 2'-deoxy-2'-fluorouridine-3'-phosphate
  modified_base 15: mod_base = OTHER; note = 2'-O-methyladenosine-3'-phosphate
  modified_base 16: mod_base = OTHER; note = 2'-deoxy-2'-fluoroadenosine-3'-phosphate
  modified_base 17: mod_base = OTHER; note = 2'-O-methyladenosine-3'-phosphate
  modified_base 18: mod_base = OTHER; note = 2'-O-methyluridine-3'-phosphate
  modified_base 19: mod_base = OTHER; note = 2'-O-methyladenosine-3'-phosphate
  modified_base 20: mod_base = OTHER; note = 2'-O-methyladenosine-3'-phosphate
  modified_base 21: mod_base = OTHER; note = 2'-O-methyladenosine-3'-phosphorothioate
  modified_base 22: mod_base = OTHER; note = 2'-O-methylcytidine-3'-phosphorothioate
  modified_base 23: mod_base = OTHER; note = 2'-O-methyladenosine
ttcaagaggattgtaaataaaca

SEQ ID NO: 316 - RNA, 23 nt, synthetic construct
  source 1..23: mol_type = other RNA
  modified_base 1: mod_base = OTHER; note = 2'-O-methyluridine-3'-phosphorothioate 5'-(E)-Vinylphosphonate
  modified_base 2: mod_base = OTHER; note = 2'-deoxy-2'-fluoroadenosine-3'-phosphorothioate
  modified_base 3: mod_base = OTHER; note = 2'-O-methyluridine-3'-phosphate
  modified_base 4: mod_base = OTHER; note = 2'-O-methyluridine-3'-phosphate
  modified_base 5: mod_base = OTHER; note = 2'-O-methylguanosine-3'-phosphate
  modified_base 6: mod_base = OTHER; note = 2'-deoxy-2'-fluoroadenosine-3'-phosphate
  modified_base 7: mod_base = OTHER; note = 2'-O-methyluridine-3'-phosphate
  modified_base 8: mod_base = OTHER; note = 2'-deoxy-2'-fluorocytidine-3'-phosphate
  modified_base 9: mod_base = OTHER; note = 2'-deoxy-2'-fluorocytidine-3'-phosphate
  modified_base 10: mod_base = OTHER; note = 2'-O-methylcytidine-3'-phosphate
  modified_base 11: mod_base = OTHER; note = 2'-O-methyladenosine-3'-phosphate
  modified_base 12: mod_base = OTHER; note = 2'-O-methyladenosine-3'-phosphate
  modified_base 13: mod_base = OTHER; note = 2'-O-methylguanosine-3'-phosphate
  modified_base 14: mod_base = OTHER; note = 2'-deoxy-2'-fluoroguanosine-3'-phosphate
  modified_base 15: mod_base = OTHER; note = 2'-O-methyladenosine-3'-phosphate
  modified_base 16: mod_base = OTHER; note = 2'-deoxy-2'-fluoroadenosine-3'-phosphate
  modified_base 17: mod_base = OTHER; note = 2'-O-methyladenosine-3'-phosphate
  modified_base 18: mod_base = OTHER; note = 2'-O-methylguanosine-3'-phosphate
  modified_base 19: mod_base = OTHER; note = 2'-O-methyladenosine-3'-phosphate
  modified_base 20: mod_base = OTHER; note = 2'-O-methyladenosine-3'-phosphate
  modified_base 21: mod_base = OTHER; note = 2'-O-methyladenosine-3'-phosphorothioate
  modified_base 22: mod_base = OTHER; note = 2'-O-methylguanosine-3'-phosphorothioate
  modified_base 23: mod_base = OTHER; note = 2'-O-methylguanosine
tattgatcccaaggaaagaaagg

SEQ ID NO: 317 - RNA, 23 nt, synthetic construct
  source 1..23: mol_type = other RNA
  modified_base 1: mod_base = OTHER; note = 2'-O-methyluridine-3'-phosphorothioate 5'-(E)-Vinylphosphonate
  modified_base 2: mod_base = OTHER; note = 2'-deoxy-2'-fluorocytidine-3'-phosphorothioate
  modified_base 3: mod_base = OTHER; note = 2'-O-methylguanosine-3'-phosphate
  modified_base 4: mod_base = OTHER; note = 2'-O-methyluridine-3'-phosphate
  modified_base 5: mod_base = OTHER; note = 2'-O-methyluridine-3'-phosphate
  modified_base 6: mod_base = OTHER; note = 2'-deoxy-2'-fluorouridine-3'-phosphate
  modified_base 7: mod_base = OTHER; note = 2'-O-methyluridine-3'-phosphate
  modified_base 8: mod_base = OTHER; note = 2'-deoxy-2'-fluorocytidine-3'-phosphate
  modified_base 9: mod_base = OTHER; note = 2'-deoxy-2'-fluorocytidine-3'-phosphate
  modified_base 10: mod_base = OTHER; note = 2'-O-methyladenosine-3'-phosphate
  modified_base 11: mod_base = OTHER; note = 2'-O-methyladenosine-3'-phosphate
  modified_base 12: mod_base = OTHER; note = 2'-O-methyluridine-3'-phosphate
  modified_base 13: mod_base = OTHER; note = 2'-O-methyluridine-3'-phosphate
  modified_base 14: mod_base = OTHER; note = 2'-deoxy-2'-fluoroguanosine-3'-phosphate
  modified_base 15: mod_base = OTHER; note = 2'-O-methyladenosine-3'-phosphate
  modified_base 16: mod_base = OTHER; note = 2'-deoxy-2'-fluorouridine-3'-phosphate
  modified_base 17: mod_base = OTHER; note = 2'-O-methylcytidine-3'-phosphate
  modified_base 18: mod_base = OTHER; note = 2'-O-methylcytidine-3'-phosphate
  modified_base 19: mod_base = OTHER; note = 2'-O-methylcytidine-3'-phosphate
  modified_base 20: mod_base = OTHER; note = 2'-O-methyladenosine-3'-phosphate
  modified_base 21: mod_base = OTHER; note = 2'-O-methyladenosine-3'-phosphorothioate
  modified_base 22: mod_base = OTHER; note = 2'-O-methylguanosine-3'-phosphorothioate
  modified_base 23: mod_base = OTHER; note = 2'-O-methylguanosine
tcgttttccaattgatcccaagg

SEQ ID NO: 318 - RNA, 23 nt, synthetic construct
  source 1..23: mol_type = other RNA
  modified_base 1: mod_base = OTHER; note = 2'-O-methyluridine-3'-phosphorothioate 5'-(E)-Vinylphosphonate
  modified_base 2: mod_base = OTHER; note = 2'-deoxy-2'-fluorouridine-3'-phosphorothioate
  modified_base 3: mod_base = OTHER; note = 2'-O-methylguanosine-3'-phosphate
  modified_base 4: mod_base = OTHER; note = 2'-O-methylcytidine-3'-phosphate
  modified_base 5: mod_base = OTHER; note = 2'-O-methylcytidine-3'-phosphate
  modified_base 6: mod_base = OTHER; note = 2'-deoxy-2'-fluorouridine-3'-phosphate
  modified_base 7: mod_base = OTHER; note = 2'-O-methyluridine-3'-phosphate
  modified_base 8: mod_base = OTHER; note = 2'-deoxy-2'-fluorouridine-3'-phosphate
  modified_base 9: mod_base = OTHER; note = 2'-deoxy-2'-fluoroguanosine-3'-phosphate
  modified_base 10: mod_base = OTHER; note = 2'-O-methyluridine-3'-phosphate
  modified_base 11: mod_base = OTHER; note = 2'-O-methyladenosine-3'-phosphate
  modified_base 12: mod_base = OTHER; note = 2'-O-methylguanosine-3'-phosphate
  modified_base 13: mod_base = OTHER; note = 2'-O-methyladenosine-3'-phosphate
  modified_base 14: mod_base = OTHER; note = 2'-deoxy-2'-fluorouridine-3'-phosphate
  modified_base 15: mod_base = OTHER; note = 2'-O-methylguanosine-3'-phosphate
  modified_base 16: mod_base = OTHER; note = 2'-deoxy-2'-fluorocytidine-3'-phosphate
  modified_base 17: mod_base = OTHER; note = 2'-O-methyluridine-3'-phosphate
  modified_base 18: mod_base = OTHER; note = 2'-O-methylcytidine-3'-phosphate
  modified_base 19: mod_base = OTHER; note = 2'-O-methylguanosine-3'-phosphate
  modified_base 20: mod_base = OTHER; note = 2'-O-methyladenosine-3'-phosphate
  modified_base 21: mod_base = OTHER; note = 2'-O-methylguanosine-3'-phosphorothioate
  modified_base 22: mod_base = OTHER; note = 2'-O-methyluridine-3'-phosphorothioate
  modified_base 23: mod_base = OTHER; note = 2'-O-methyluridine
ttgcctttgtagatgctcgagtt

SEQ ID NO: 319 - RNA, 23 nt, synthetic construct
  source 1..23: mol_type = other RNA
  modified_base 1: mod_base = OTHER; note = 2'-O-methyluridine-3'-phosphorothioate 5'-(E)-Vinylphosphonate
  modified_base 2: mod_base = OTHER; note = 2'-deoxy-2'-fluoroguanosine-3'-phosphorothioate
  modified_base 3: mod_base = OTHER; note = 2'-O-methyluridine-3'-phosphate
  modified_base 4: mod_base = OTHER; note = 2'-O-methylguanosine-3'-phosphate
  modified_base 5: mod_base = OTHER; note = 2'-O-methyladenosine-3'-phosphate
  modified_base 6: mod_base = OTHER; note = 2'-deoxy-2'-fluoroadenosine-3'-phosphate
  modified_base 7: mod_base = OTHER; note = 2'-O-methyladenosine-3'-phosphate
  modified_base 8: mod_base = OTHER; note = 2'-deoxy-2'-fluorouridine-3'-phosphate
  modified_base 9: mod_base = OTHER; note = 2'-deoxy-2'-fluorocytidine-3'-phosphate
  modified_base 10: mod_base = OTHER; note = 2'-O-methylguanosine-3'-phosphate
  modified_base 11: mod_base = OTHER; note = 2'-O-methyladenosine-3'-phosphate
  modified_base 12: mod_base = OTHER; note = 2'-O-methyladenosine-3'-phosphate
  modified_base 13: mod_base = OTHER; note = 2'-O-methylguanosine-3'-phosphate
  modified_base 14: mod_base = OTHER; note = 2'-deoxy-2'-fluorocytidine-3'-phosphate
  modified_base 15: mod_base = OTHER; note = 2'-O-methyladenosine-3'-phosphate
  modified_base 16: mod_base = OTHER; note = 2'-deoxy-2'-fluoroguanosine-3'-phosphate
  modified_base 17: mod_base = OTHER; note = 2'-O-methylguanosine-3'-phosphate
  modified_base 18: mod_base = OTHER; note = 2'-O-methyladenosine-3'-phosphate
  modified_base 19: mod_base = OTHER; note = 2'-O-methylcytidine-3'-phosphate
  modified_base 20: mod_base = OTHER; note = 2'-O-methyluridine-3'-phosphate
  modified_base 21: mod_base = OTHER; note = 2'-O-methylcytidine-3'-phosphorothioate
  modified_base 22: mod_base = OTHER; note = 2'-O-methylcytidine-3'-phosphorothioate
  modified_base 23: mod_base = OTHER; note = 2'-O-methyladenosine
tgtgaaatcgaagcaggactcca

SEQ ID NO: 320 - RNA, 23 nt, synthetic construct
  source 1..23: mol_type = other RNA
  modified_base 1: mod_base = OTHER; note = 2'-O-methyluridine-3'-phosphorothioate 5'-(E)-Vinylphosphonate
  modified_base 2: mod_base = OTHER; note = 2'-deoxy-2'-fluoroguanosine-3'-phosphorothioate
  modified_base 3: mod_base = OTHER; note = 2'-O-methylguanosine-3'-phosphate
  modified_base 4: mod_base = OTHER; note = 2'-O-methyluridine-3'-phosphate
  modified_base 5: mod_base = OTHER; note = 2'-O-methylguanosine-3'-phosphate
  modified_base 6: mod_base = OTHER; note = 2'-deoxy-2'-fluoroadenosine-3'-phosphate
  modified_base 7: mod_base = OTHER; note = 2'-O-methyladenosine-3'-phosphate
  modified_base 8: mod_base = OTHER; note = 2'-deoxy-2'-fluoroadenosine-3'-phosphate
  modified_base 9: mod_base = OTHER; note = 2'-deoxy-2'-fluorouridine-3'-phosphate
  modified_base 10: mod_base = OTHER; note = 2'-O-methylcytidine-3'-phosphate
  modified_base 11: mod_base = OTHER; note = 2'-O-methylguanosine-3'-phosphate
  modified_base 12: mod_base = OTHER; note = 2'-O-methyladenosine-3'-phosphate
  modified_base 13: mod_base = OTHER; note = 2'-O-methyladenosine-3'-phosphate
  modified_base 14: mod_base = OTHER; note = 2'-deoxy-2'-fluoroguanosine-3'-phosphate
  modified_base 15: mod_base = OTHER; note = 2'-O-methylcytidine-3'-phosphate
  modified_base 16: mod_base = OTHER; note = 2'-deoxy-2'-fluoroadenosine-3'-phosphate
  modified_base 17: mod_base = OTHER; note = 2'-O-methylguanosine-3'-phosphate
  modified_base 18: mod_base = OTHER; note = 2'-O-methylguanosine-3'-phosphate
  modified_base 19: mod_base = OTHER; note = 2'-O-methyladenosine-3'-phosphate
  modified_base 20: mod_base = OTHER; note = 2'-O-methylcytidine-3'-phosphate
  modified_base 21: mod_base = OTHER; note = 2'-O-methyluridine-3'-phosphorothioate
  modified_base 22: mod_base = OTHER; note = 2'-O-methylcytidine-3'-phosphorothioate
  modified_base 23: mod_base = OTHER; note = 2'-O-methylcytidine
tggtgaaatcgaagcaggactcc

SEQ ID NO: 321 - RNA, 23 nt, synthetic construct
  source 1..23: mol_type = other RNA
  modified_base 1: mod_base = OTHER; note = 2'-O-methyluridine-3'-phosphorothioate 5'-(E)-Vinylphosphonate
  modified_base 2: mod_base = OTHER; note = 2'-deoxy-2'-fluorocytidine-3'-phosphorothioate
  modified_base 3: mod_base = OTHER; note = 2'-O-methylguanosine-3'-phosphate
  modified_base 4: mod_base = OTHER; note = 2'-O-methyluridine-3'-phosphate
  modified_base 5: mod_base = OTHER; note = 2'-O-methyluridine-3'-phosphate
  modified_base 6: mod_base = OTHER; note = 2'-deoxy-2'-fluorouridine-3'-phosphate
  modified_base 7: mod_base = OTHER; note = 2'-O-methyluridine-3'-phosphate
  modified_base 8: mod_base = OTHER; note = 2'-deoxy-2'-fluorouridine-3'-phosphate
  modified_base 9: mod_base = OTHER; note = 2'-deoxy-2'-fluorocytidine-3'-phosphate
  modified_base 10: mod_base = OTHER; note = 2'-O-methyluridine-3'-phosphate
  modified_base 11: mod_base = OTHER; note = 2'-O-methyluridine-3'-phosphate
  modified_base 12: mod_base = OTHER; note = 2'-O-methylguanosine-3'-phosphate
  modified_base 13: mod_base = OTHER; note = 2'-O-methylcytidine-3'-phosphate
  modified_base 14: mod_base = OTHER; note = 2'-deoxy-2'-fluoroadenosine-3'-phosphate
  modified_base 15: mod_base = OTHER; note = 2'-O-methyladenosine-3'-phosphate
  modified_base 16: mod_base = OTHER; note = 2'-deoxy-2'-fluoroadenosine-3'-phosphate
  modified_base 17: mod_base = OTHER; note = 2'-O-methylguanosine-3'-phosphate
  modified_base 18: mod_base = OTHER; note = 2'-O-methylguanosine-3'-phosphate
  modified_base 19: mod_base = OTHER; note = 2'-O-methylguanosine-3'-phosphate
  modified_base 20: mod_base = OTHER; note = 2'-O-methyluridine-3'-phosphate
  modified_base 21: mod_base = OTHER; note = 2'-O-methylguanosine-3'-phosphorothioate
  modified_base 22: mod_base = OTHER; note = 2'-O-methyladenosine-3'-phosphorothioate
  modified_base 23: mod_base = OTHER; note = 2'-O-methyladenosine
tcgtttttcttgcaaagggtgaa

SEQ ID NO: 322 - RNA, 23 nt, synthetic construct
  source 1..23: mol_type = other RNA
  modified_base 1: mod_base = OTHER; note = 2'-O-methyluridine-3'-phosphorothioate 5'-(E)-Vinylphosphonate
  modified_base 2: mod_base = OTHER; note = 2'-deoxy-2'-fluoroguanosine-3'-phosphorothioate
  modified_base 3: mod_base = OTHER; note = 2'-O-methylcytidine-3'-phosphate
  modified_base 4: mod_base = OTHER; note = 2'-O-methylcytidine-3'-phosphate
  modified_base 5: mod_base = OTHER; note = 2'-O-methylguanosine-3'-phosphate
  modified_base 6: mod_base = OTHER; note = 2'-deoxy-2'-fluorouridine-3'-phosphate
  modified_base 7: mod_base = OTHER; note = 2'-O-methyluridine-3'-phosphate
  modified_base 8: mod_base = OTHER; note = 2'-deoxy-2'-fluorouridine-3'-phosphate
  modified_base 9: mod_base = OTHER; note = 2'-deoxy-2'-fluorouridine-3'-phosphate
  modified_base 10: mod_base = OTHER; note = 2'-O-methyluridine-3'-phosphate
  modified_base 11: mod_base = OTHER; note = 2'-O-methylcytidine-3'-phosphate
  modified_base 12: mod_base = OTHER; note = 2'-O-methyluridine-3'-phosphate
  modified_base 13: mod_base = OTHER; note = 2'-O-methyluridine-3'-phosphate
  modified_base 14: mod_base = OTHER; note = 2'-deoxy-2'-fluoroguanosine-3'-phosphate
  modified_base 15: mod_base = OTHER; note = 2'-O-methylcytidine-3'-phosphate
  modified_base 16: mod_base = OTHER; note = 2'-deoxy-2'-fluoroadenosine-3'-phosphate
  modified_base 17: mod_base = OTHER; note = 2'-O-methyladenosine-3'-phosphate
  modified_base 18: mod_base = OTHER; note = 2'-O-methyladenosine-3'-phosphate
  modified_base 19: mod_base = OTHER; note = 2'-O-methylguanosine-3'-phosphate
  modified_base 20: mod_base = OTHER; note = 2'-O-methylguanosine-3'-phosphate
  modified_base 21: mod_base = OTHER; note = 2'-O-methylguanosine-3'-phosphorothioate
  modified_base 22: mod_base = OTHER; note = 2'-O-methyluridine-3'-phosphorothioate
  modified_base 23: mod_base = OTHER; note = 2'-O-methylguanosine
tgccgtttttcttgcaaagggtg

SEQ ID NO: 323 - RNA, 23 nt, synthetic construct
  source 1..23: mol_type = other RNA
  modified_base 1: mod_base = OTHER; note = 2'-O-methyluridine-3'-phosphorothioate 5'-(E)-Vinylphosphonate
  modified_base 2: mod_base = OTHER; note = 2'-deoxy-2'-fluorouridine-3'-phosphorothioate
  modified_base 3: mod_base = OTHER; note = 2'-O-methyladenosine-3'-phosphate
  modified_base 4: mod_base = OTHER; note = 2'-O-methylguanosine-3'-phosphate
  modified_base 5: mod_base = OTHER; note = 2'-O-methyladenosine-3'-phosphate
  modified_base 6: mod_base = OTHER; note = 2'-deoxy-2'-fluorocytidine-3'-phosphate
  modified_base 7: mod_base = OTHER; note = 2'-O-methyluridine-3'-phosphate
  modified_base 8: mod_base = OTHER; note = 2'-deoxy-2'-fluorouridine-3'-phosphate
  modified_base 9: mod_base = OTHER; note = 2'-deoxy-2'-fluorouridine-3'-phosphate
  modified_base 10: mod_base = OTHER; note = 2'-O-methylguanosine-3'-phosphate
  modified_base 11: mod_base = OTHER; note = 2'-O-methyladenosine-3'-phosphate
  modified_base 12: mod_base = OTHER; note = 2'-O-methyladenosine-3'-phosphate
  modified_base 13: mod_base = OTHER; note = 2'-O-methylguanosine-3'-phosphate
  modified_base 14: mod_base = OTHER; note = 2'-deoxy-2'-fluorocytidine-3'-phosphate
  modified_base 15: mod_base = OTHER; note = 2'-O-methylcytidine-3'-phosphate
  modified_base 16: mod_base = OTHER; note = 2'-deoxy-2'-fluoroguanosine-3'-phosphate
  modified_base 17: mod_base = OTHER; note = 2'-O-methyluridine-3'-phosphate
  modified_base 18: mod_base = OTHER; note = 2'-O-methyluridine-3'-phosphate
  modified_base 19: mod_base = OTHER; note = 2'-O-methyluridine-3'-phosphate
  modified_base 20: mod_base = OTHER; note = 2'-O-methyluridine-3'-phosphate
  modified_base 21: mod_base = OTHER; note = 2'-O-methyluridine-3'-phosphorothioate
  modified_base 22: mod_base = OTHER; note = 2'-O-methylcytidine-3'-phosphorothioate
  modified_base 23: mod_base = OTHER; note = 2'-O-methyluridine
ttagactttgaagccgtttttct

SEQ ID NO: 324 - RNA, 23 nt, synthetic construct
  source 1..23: mol_type = other RNA
  modified_base 1: mod_base = OTHER; note = 2'-O-methyluridine-3'-phosphorothioate 5'-(E)-Vinylphosphonate
  modified_base 2: mod_base = OTHER; note = 2'-deoxy-2'-fluoroadenosine-3'-phosphorothioate
  modified_base 3: mod_base = OTHER; note = 2'-O-methylcytidine-3'-phosphate
  modified_base 4: mod_base = OTHER; note = 2'-O-methylguanosine-3'-phosphate
  modified_base 5: mod_base = OTHER; note = 2'-O-methyluridine-3'-phosphate
  modified_base 6: mod_base = OTHER; note = 2'-deoxy-2'-fluoroadenosine-3'-phosphate
  modified_base 7: mod_base = OTHER; note = 2'-O-methylguanosine-3'-phosphate
  modified_base 8: mod_base = OTHER; note = 2'-deoxy-2'-fluoroadenosine-3'-phosphate
  modified_base 9: mod_base = OTHER; note = 2'-deoxy-2'-fluorocytidine-3'-phosphate
  modified_base 10: mod_base = OTHER; note = 2'-O-methyluridine-3'-phosphate
  modified_base 11: mod_base = OTHER; note = 2'-O-methyluridine-3'-phosphate
  modified_base 12: mod_base = OTHER; note = 2'-O-methyluridine-3'-phosphate
  modified_base 13: mod_base = OTHER; note = 2'-O-methylguanosine-3'-phosphate
  modified_base 14: mod_base = OTHER; note = 2'-deoxy-2'-fluoroadenosine-3'-phosphate
  modified_base 15: mod_base = OTHER; note = 2'-O-methyladenosine-3'-phosphate
  modified_base 16: mod_base = OTHER; note = 2'-deoxy-2'-fluoroguanosine-3'-phosphate
  modified_base 17: mod_base = OTHER; note = 2'-O-methylcytidine-3'-phosphate
  modified_base 18: mod_base = OTHER; note = 2'-O-methylcytidine-3'-phosphate
  modified_base 19: mod_base = OTHER; note = 2'-O-methylguanosine-3'-phosphate
  modified_base 20: mod_base = OTHER; note = 2'-O-methyluridine-3'-phosphate
  modified_base 21: mod_base = OTHER; note = 2'-O-methyluridine-3'-phosphorothioate
  modified_base 22: mod_base = OTHER; note = 2'-O-methyluridine-3'-phosphorothioate
  modified_base 23: mod_base = OTHER; note = 2'-O-methyluridine
tacgtagactttgaagccgtttt

SEQ ID NO: 325 - RNA, 23 nt, synthetic construct
  source 1..23: mol_type = other RNA
  modified_base 1: mod_base = OTHER; note = 2'-O-methyluridine-3'-phosphorothioate 5'-(E)-Vinylphosphonate
  modified_base 2: mod_base = OTHER; note = 2'-deoxy-2'-fluorocytidine-3'-phosphorothioate
  modified_base 3: mod_base = OTHER; note = 2'-O-methylcytidine-3'-phosphate
  modified_base 4: mod_base = OTHER; note = 2'-O-methylguanosine-3'-phosphate
  modified_base 5: mod_base = OTHER; note = 2'-O-methylcytidine-3'-phosphate
  modified_base 6: mod_base = OTHER; note = 2'-deoxy-2'-fluorouridine-3'-phosphate
  modified_base 7: mod_base = OTHER; note = 2'-O-methyladenosine-3'-phosphate
  modified_base 8: mod_base = OTHER; note = 2'-deoxy-2'-fluoroguanosine-3'-phosphate
  modified_base 9: mod_base = OTHER; note = 2'-deoxy-2'-fluoroadenosine-3'-phosphate
  modified_base 10: mod_base = OTHER; note = 2'-O-methyladenosine-3'-phosphate
  modified_base 11: mod_base = OTHER; note = 2'-O-methyluridine-3'-phosphate
  modified_base 12: mod_base = OTHER; note = 2'-O-methylguanosine-3'-phosphate
  modified_base 13: mod_base = OTHER; note = 2'-O-methyluridine-3'-phosphate
  modified_base 14: mod_base = OTHER; note = 2'-deoxy-2'-fluorouridine-3'-phosphate
  modified_base 15: mod_base = OTHER; note = 2'-O-methyluridine-3'-phosphate
  modified_base 16: mod_base = OTHER; note = 2'-deoxy-2'-fluorouridine-3'-phosphate
  modified_base 17: mod_base = OTHER; note = 2'-O-methylguanosine-3'-phosphate
  modified_base 18: mod_base = OTHER; note = 2'-O-methylguanosine-3'-phosphate
  modified_base 19: mod_base = OTHER; note = 2'-O-methyluridine-3'-phosphate
  modified_base 20: mod_base = OTHER; note = 2'-O-methyladenosine-3'-phosphate
  modified_base 21: mod_base = OTHER; note = 2'-O-methyladenosine-3'-phosphorothioate
  modified_base 22: mod_base = OTHER; note = 2'-O-methylcytidine-3'-phosphorothioate
  modified_base 23: mod_base = OTHER; note = 2'-O-methyluridine
tccgctagaatgttttggtaact

SEQ ID NO: 326 - RNA, 23 nt, synthetic construct
  source 1..23: mol_type = other RNA
  modified_base 1: mod_base = OTHER; note = 2'-O-methyluridine-3'-phosphorothioate 5'-(E)-Vinylphosphonate
  modified_base 2: mod_base = OTHER; note = 2'-deoxy-2'-fluorouridine-3'-phosphorothioate
  modified_base 3: mod_base = OTHER; note = 2'-O-methyladenosine-3'-phosphate
  modified_base 4: mod_base = OTHER; note = 2'-O-methyluridine-3'-phosphate
  modified_base 5: mod_base = OTHER; note = 2'-O-methylcytidine-3'-phosphate
  modified_base 6: mod_base = OTHER; note = 2'-deoxy-2'-fluorocytidine-3'-phosphate
  modified_base 7: mod_base = OTHER; note = 2'-O-methyladenosine-3'-phosphate
  modified_base 8: mod_base = OTHER; note = 2'-deoxy-2'-fluoroguanosine-3'-phosphate
  modified_base 9: mod_base = OTHER; note = 2'-deoxy-2'-fluoroadenosine-3'-phosphate
  modified_base 10: mod_base = OTHER; note = 2'-O-methylcytidine-3'-phosphate
  modified_base 11: mod_base = OTHER; note = 2'-O-methyluridine-3'-phosphate
  modified_base 12: mod_base = OTHER; note = 2'-O-methylcytidine-3'-phosphate
  modified_base 13: mod_base = OTHER; note = 2'-O-methyladenosine-3'-phosphate
  modified_base 14: mod_base = OTHER; note = 2'-deoxy-2'-fluoroadenosine-3'-phosphate
  modified_base 15: mod_base = OTHER; note = 2'-O-methylguanosine-3'-phosphate
  modified_base 16: mod_base = OTHER; note = 2'-deoxy-2'-fluoroadenosine-3'-phosphate
  modified_base 17: mod_base = OTHER; note = 2'-O-methylcytidine-3'-phosphate
  modified_base 18: mod_base = OTHER; note = 2'-O-methyladenosine-3'-phosphate
  modified_base 19: mod_base = OTHER; note = 2'-O-methyladenosine-3'-phosphate
  modified_base 20: mod_base = OTHER; note = 2'-O-methyladenosine-3'-phosphate
  modified_base 21: mod_base = OTHER; note = 2'-O-methylguanosine-3'-phosphorothioate
  modified_base 22: mod_base = OTHER; note = 2'-O-methyladenosine-3'-phosphorothioate
  modified_base 23: mod_base = OTHER; note = 2'-O-methylguanosine
ttatccagactcaagacaaagag

SEQ ID NO: 327 - RNA, 23 nt, synthetic construct
  source 1..23: mol_type = other RNA
  modified_base 1: mod_base = OTHER; note = 2'-O-methyluridine-3'-phosphorothioate 5'-(E)-Vinylphosphonate
  modified_base 2: mod_base = OTHER; note = 2'-deoxy-2'-fluorocytidine-3'-phosphorothioate
  modified_base 3: mod_base = OTHER; note = 2'-O-methyluridine-3'-phosphate
  modified_base 4: mod_base = OTHER; note = 2'-O-methyladenosine-3'-phosphate
  modified_base 5: mod_base = OTHER; note = 2'-O-methyladenosine-3'-phosphate
  modified_base 6: mod_base = OTHER; note = 2'-deoxy-2'-fluoroadenosine-3'-phosphate
  modified_base 7: mod_base = OTHER; note = 2'-O-methylguanosine-3'-phosphate
  modified_base 8: mod_base = OTHER; note = 2'-deoxy-2'-fluorouridine-3'-phosphate
  modified_base 9: mod_base = OTHER; note = 2'-deoxy-2'-fluoroadenosine-3'-phosphate
  modified_base 10: mod_base = OTHER; note = 2'-O-methyluridine-3'-phosphate
  modified_base 11: mod_base = OTHER; note = 2'-O-methylcytidine-3'-phosphate
  modified_base 12: mod_base = OTHER; note = 2'-O-methylcytidine-3'-phosphate
  modified_base 13: mod_base = OTHER; note = 2'-O-methyladenosine-3'-phosphate
  modified_base 14: mod_base = OTHER; note = 2'-deoxy-2'-fluoroguanosine-3'-phosphate
  modified_base 15: mod_base = OTHER; note = 2'-O-methyladenosine-3'-phosphate
  modified_base 16: mod_base = OTHER; note = 2'-deoxy-2'-fluorocytidine-3'-phosphate
  modified_base 17: mod_base = OTHER; note = 2'-O-methyluridine-3'-phosphate
  modified_base 18: mod_base = OTHER; note = 2'-O-methylcytidine-3'-phosphate
  modified_base 19: mod_base = OTHER; note = 2'-O-methyladenosine-3'-phosphate
  modified_base 20: mod_base = OTHER; note = 2'-O-methyladenosine-3'-phosphate
  modified_base 21: mod_base = OTHER; note = 2'-O-methylguanosine-3'-phosphorothioate
  modified_base 22: mod_base = OTHER; note = 2'-O-methyladenosine-3'-phosphorothioate
  modified_base 23: mod_base = OTHER; note = 2'-O-methylcytidine
tctaaagtatccagactcaagac

SEQ ID NO: 328 - RNA, 23 nt, synthetic construct
  source 1..23: mol_type = other RNA
  modified_base 1: mod_base = OTHER; note = 2'-O-methyluridine-3'-phosphorothioate 5'-(E)-Vinylphosphonate
  modified_base 2: mod_base = OTHER; note = 2'-deoxy-2'-fluorouridine-3'-phosphorothioate
  modified_base 3: mod_base = OTHER; note = 2'-O-methylcytidine-3'-phosphate
  modified_base 4: mod_base = OTHER; note = 2'-O-methyluridine-3'-phosphate
  modified_base 5: mod_base = OTHER; note = 2'-O-methylguanosine-3'-phosphate
  modified_base 6: mod_base = OTHER; note = 2'-deoxy-2'-fluorouridine-3'-phosphate
  modified_base 7: mod_base = OTHER; note = 2'-O-methylcytidine-3'-phosphate
  modified_base 8: mod_base = OTHER; note = 2'-deoxy-2'-fluorouridine-3'-phosphate
  modified_base 9: mod_base = OTHER; note = 2'-deoxy-2'-fluoroadenosine-3'-phosphate
  modified_base 10: mod_base = OTHER; note = 2'-O-methyladenosine-3'-phosphate
  modified_base 11: mod_base = OTHER; note = 2'-O-methyladenosine-3'-phosphate
  modified_base 12: mod_base = OTHER; note = 2'-O-methylguanosine-3'-phosphate
  modified_base 13: mod_base = OTHER; note = 2'-O-methyluridine-3'-phosphate
  modified_base 14: mod_base = OTHER; note = 2'-deoxy-2'-fluoroadenosine-3'-phosphate
  modified_base 15: mod_base = OTHER; note = 2'-O-methyluridine-3'-phosphate
  modified_base 16: mod_base = OTHER; note = 2'-deoxy-2'-fluorocytidine-3'-phosphate
  modified_base 17: mod_base = OTHER; note = 2'-O-methylcytidine-3'-phosphate
  modified_base 18: mod_base = OTHER; note = 2'-O-methyladenosine-3'-phosphate
  modified_base 19: mod_base = OTHER; note = 2'-O-methylguanosine-3'-phosphate
  modified_base 20: mod_base = OTHER; note = 2'-O-methyladenosine-3'-phosphate
  modified_base 21: mod_base = OTHER; note = 2'-O-methylcytidine-3'-phosphorothioate
  modified_base 22: mod_base = OTHER; note = 2'-O-methyluridine-3'-phosphorothioate
  modified_base 23: mod_base = OTHER; note = 2'-O-methylcytidine
ttctgtctaaagtatccagactc

SEQ ID NO: 329 - RNA, 23 nt, synthetic construct
  source 1..23: mol_type = other RNA
  modified_base 1: mod_base = OTHER; note = 2'-O-methyluridine-3'-phosphorothioate 5'-(E)-Vinylphosphonate
  modified_base 2: mod_base = OTHER; note = 2'-deoxy-2'-fluorouridine-3'-phosphorothioate
  modified_base 3: mod_base = OTHER; note = 2'-O-methyluridine-3'-phosphate
  modified_base 4: mod_base = OTHER; note = 2'-O-methylguanosine-3'-phosphate
  modified_base 5: mod_base = OTHER; note = 2'-O-methylguanosine-3'-phosphate
  modified_base 6: mod_base = OTHER; note = 2'-deoxy-2'-fluoroadenosine-3'-phosphate
  modified_base 7: mod_base = OTHER; note = 2'-O-methyluridine-3'-phosphate
  modified_base 8: mod_base = OTHER; note = 2'-deoxy-2'-fluorocytidine-3'-phosphate
  modified_base 9: mod_base = OTHER; note = 2'-deoxy-2'-fluorouridine-3'-phosphate
  modified_base 10: mod_base = OTHER; note = 2'-O-methylcytidine-3'-phosphate
  modified_base 11: mod_base = OTHER; note = 2'-O-methyladenosine-3'-phosphate
  modified_base 12: mod_base = OTHER; note = 2'-O-methyladenosine-3'-phosphate
  modified_base 13: mod_base = OTHER; note = 2'-O-methyladenosine-3'-phosphate
  modified_base 14: mod_base = OTHER; note = 2'-deoxy-2'-fluorouridine-3'-phosphate
  modified_base 15: mod_base = OTHER; note = 2'-O-methyluridine-3'-phosphate
  modified_base 16: mod_base = OTHER; note = 2'-deoxy-2'-fluoroguanosine-3'-phosphate
  modified_base 17: mod_base = OTHER; note = 2'-O-methyluridine-3'-phosphate
  modified_base 18: mod_base = OTHER; note = 2'-O-methylguanosine-3'-phosphate
  modified_base 19: mod_base = OTHER; note = 2'-O-methylcytidine-3'-phosphate
  modified_base 20: mod_base = OTHER; note = 2'-O-methyladenosine-3'-phosphate
  modified_base 21: mod_base = OTHER; note = 2'-O-methylcytidine-3'-phosphorothioate
  modified_base 22: mod_base = OTHER; note = 2'-O-methyladenosine-3'-phosphorothioate
  modified_base 23: mod_base = OTHER; note = 2'-O-methyluridine
tttggatctcaaattgtgcacat

SEQ ID NO: 330 - RNA, 23 nt, synthetic construct
  source 1..23: mol_type = other RNA
  modified_base 1: mod_base = OTHER; note = 2'-O-methyluridine-3'-phosphorothioate 5'-(E)-Vinylphosphonate
  modified_base 2: mod_base = OTHER; note = 2'-deoxy-2'-fluoroguanosine-3'-phosphorothioate
  modified_base 3: mod_base = OTHER; note = 2'-O-methyladenosine-3'-phosphate
  modified_base 4: mod_base = OTHER; note = 2'-O-methyluridine-3'-phosphate
  modified_base 5: mod_base = OTHER; note = 2'-O-methyluridine-3'-phosphate
  modified_base 6: mod_base = OTHER; note = 2'-deoxy-2'-fluorocytidine-3'-phosphate
  modified_base 7: mod_base = OTHER; note = 2'-O-methylcytidine-3'-phosphate
  modified_base 8: mod_base = OTHER; note = 2'-deoxy-2'-fluorouridine-3'-phosphate
  modified_base 9: mod_base = OTHER; note = 2'-deoxy-2'-fluoroadenosine-3'-phosphate
  modified_base 10: mod_base = OTHER; note = 2'-O-methylcytidine-3'-phosphate
  modified_base 11: mod_base = OTHER; note = 2'-O-methylcytidine-3'-phosphate
  modified_base 12: mod_base = OTHER; note = 2'-O-methyladenosine-3'-phosphate
  modified_base 13: mod_base = OTHER; note = 2'-O-methyluridine-3'-phosphate
  modified_base 14: mod_base = OTHER; note = 2'-deoxy-2'-fluorouridine-3'-phosphate
  modified_base 15: mod_base = OTHER; note = 2'-O-methylguanosine-3'-phosphate
  modified_base 16: mod_base = OTHER; note = 2'-deoxy-2'-fluorouridine-3'-phosphate
  modified_base 17: mod_base = OTHER; note = 2'-O-methyluridine-3'-phosphate
  modified_base 18: mod_base = OTHER; note = 2'-O-methylcytidine-3'-phosphate
  modified_base 19: mod_base = OTHER; note = 2'-O-methylcytidine-3'-phosphate
  modified_base 20: mod_base = OTHER; note = 2'-O-methyladenosine-3'-phosphate
  modified_base 21: mod_base = OTHER; note = 2'-O-methylcytidine-3'-phosphorothioate
  modified_base 22: mod_base = OTHER; note = 2'-O-methyladenosine-3'-phosphorothioate
  modified_base 23: mod_base = OTHER; note = 2'-O-methyladenosine
tgattcctaccattgttccacaa

SEQ ID NO: 331 - RNA, 23 nt, synthetic construct
  source 1..23: mol_type = other RNA
  modified_base 1: mod_base = OTHER; note = 2'-O-methyluridine-3'-phosphorothioate 5'-(E)-Vinylphosphonate
  modified_base 2: mod_base = OTHER; note = 2'-deoxy-2'-fluoroadenosine-3'-phosphorothioate
  modified_base 3: mod_base = OTHER; note = 2'-O-methyladenosine-3'-phosphate
  modified_base 4: mod_base = OTHER; note = 2'-O-methyluridine-3'-phosphate
  modified_base 5: mod_base = OTHER; note = 2'-O-methylguanosine-3'-phosphate
  modified_base 6: mod_base = OTHER; note = 2'-deoxy-2'-fluoroadenosine-3'-phosphate
  modified_base 7: mod_base = OTHER; note = 2'-O-methyluridine-3'-phosphate
  modified_base 8: mod_base = OTHER; note = 2'-deoxy-2'-fluorouridine-3'-phosphate
  modified_base 9: mod_base = OTHER; note = 2'-deoxy-2'-fluorocytidine-3'-phosphate
  modified_base 10: mod_base = OTHER; note = 2'-O-methylcytidine-3'-phosphate
  modified_base 11: mod_base = OTHER; note = 2'-O-methyluridine-3'-phosphate
  modified_base 12: mod_base = OTHER; note = 2'-O-methyladenosine-3'-phosphate
  modified_base 13: mod_base = OTHER; note = 2'-O-methylcytidine-3'-phosphate
  modified_base 14: mod_base = OTHER; note = 2'-deoxy-2'-fluorocytidine-3'-phosphate
  modified_base 15: mod_base = OTHER; note = 2'-O-methyladenosine-3'-phosphate
  modified_base 16: mod_base = OTHER; note = 2'-deoxy-2'-fluorouridine-3'-phosphate
  modified_base 17: mod_base = OTHER; note = 2'-O-methyluridine-3'-phosphate
  modified_base 18: mod_base = OTHER; note = 2'-O-methylguanosine-3'-phosphate
  modified_base 19: mod_base = OTHER; note = 2'-O-methyluridine-3'-phosphate
  modified_base 20: mod_base = OTHER; note = 2'-O-methyluridine-3'-phosphate
  modified_base 21: mod_base = OTHER; note = 2'-O-methylcytidine-3'-phosphorothioate
  modified_base 22: mod_base = OTHER; note = 2'-O-methylcytidine-3'-phosphorothioate
  modified_base 23: mod_base = OTHER; note = 2'-O-methyladenosine
taatgattcctaccattgttcca

SEQ ID NO: 332 - RNA, 23 nt, synthetic construct
  source 1..23: mol_type = other RNA
  modified_base 1: mod_base = OTHER; note = 2'-O-methyluridine-3'-phosphorothioate 5'-(E)-Vinylphosphonate
  modified_base 2: mod_base = OTHER; note = 2'-deoxy-2'-fluorocytidine-3'-phosphorothioate
  modified_base 3: mod_base = OTHER; note = 2'-O-methylguanosine-3'-phosphate
  modified_base 4: mod_base = OTHER; note = 2'-O-methylguanosine-3'-phosphate
  modified_base 5: mod_base = OTHER; note = 2'-O-methyladenosine-3'-phosphate
  modified_base 6: mod_base = OTHER; note = 2'-deoxy-2'-fluoroadenosine-3'-phosphate
  modified_base 7: mod_base = OTHER; note = 2'-O-methylguanosine-3'-phosphate
  modified_base 8: mod_base = OTHER; note = 2'-deoxy-2'-fluorouridine-3'-phosphate
  modified_base 9: mod_base = OTHER; note = 2'-deoxy-2'-fluorouridine-3'-phosphate
  modified_base 10: mod_base = OTHER; note = 2'-O-methyluridine-3'-phosphate
  modified_base 11: mod_base = OTHER; note = 2'-O-methyluridine-3'-phosphate
  modified_base 12: mod_base = OTHER; note = 2'-O-methylcytidine-3'-phosphate
  modified_base 13: mod_base = OTHER; note = 2'-O-methyladenosine-3'-phosphate
  modified_base 14: mod_base = OTHER; note = 2'-deoxy-2'-fluoroguanosine-3'-phosphate
  modified_base 15: mod_base = OTHER; note = 2'-O-methyluridine-3'-phosphate
  modified_base 16: mod_base = OTHER; note = 2'-deoxy-2'-fluoroadenosine-3'-phosphate
  modified_base 17: mod_base = OTHER; note = 2'-O-methylcytidine-3'-phosphate
  modified_base 18: mod_base = OTHER; note = 2'-O-methyluridine-3'-phosphate
  modified_base 19: mod_base = OTHER; note = 2'-O-methylguanosine-3'-phosphate
  modified_base 20: mod_base = OTHER; note = 2'-O-methyladenosine-3'-phosphate
  modified_base 21: mod_base = OTHER; note = 2'-O-methyluridine-3'-phosphorothioate
  modified_base 22: mod_base = OTHER; note = 2'-O-methylguanosine-3'-phosphorothioate
  modified_base 23: mod_base = OTHER; note = 2'-O-methylcytidine
tcggaagttttcagtactgatgc

SEQ ID NO: 333 - RNA, 23 nt, synthetic construct
  source 1..23: mol_type = other RNA
  modified_base 1: mod_base = OTHER; note = 2'-O-methyluridine-3'-phosphorothioate 5'-(E)-Vinylphosphonate
  modified_base 2: mod_base = OTHER; note = 2'-deoxy-2'-fluorouridine-3'-phosphorothioate
  modified_base 3: mod_base = OTHER; note = 2'-O-methylcytidine-3'-phosphate
  modified_base 4: mod_base = OTHER; note = 2'-O-methylguanosine-3'-phosphate
  modified_base 5: mod_base = OTHER; note = 2'-O-methylguanosine-3'-phosphate
  modified_base 6: mod_base = OTHER; note = 2'-deoxy-2'-fluoroadenosine-3'-phosphate
  modified_base 7: mod_base = OTHER; note = 2'-O-methyladenosine-3'-phosphate
  modified_base 8: mod_base = OTHER; note = 2'-deoxy-2'-fluoroguanosine-3'-phosphate
  modified_base 9: mod_base = OTHER; note = 2'-deoxy-2'-fluorouridine-3'-phosphate
  modified_base 10: mod_base = OTHER; note = 2'-O-methyluridine-3'-phosphate
  modified_base 11: mod_base = OTHER; note = 2'-O-methyluridine-3'-phosphate
  modified_base 12: mod_base = OTHER; note = 2'-O-methyluridine-3'-phosphate
  modified_base 13: mod_base = OTHER; note = 2'-O-methylcytidine-3'-phosphate
  modified_base 14: mod_base = OTHER; note = 2'-deoxy-2'-fluoroadenosine-3'-phosphate
  modified_base 15: mod_base = OTHER; note = 2'-O-methylguanosine-3'-phosphate
  modified_base 16: mod_base = OTHER; note = 2'-deoxy-2'-fluorouridine-3'-phosphate
  modified_base 17: mod_base = OTHER; note = 2'-O-methyladenosine-3'-phosphate
  modified_base 18: mod_base = OTHER; note = 2'-O-methylcytidine-3'-phosphate
  modified_base 19: mod_base = OTHER; note = 2'-O-methyluridine-3'-phosphate
  modified_base 20: mod_base = OTHER; note = 2'-O-methylguanosine-3'-phosphate
  modified_base 21: mod_base = OTHER; note = 2'-O-methyladenosine-3'-phosphorothioate
  modified_base 22: mod_base = OTHER; note = 2'-O-methyluridine-3'-phosphorothioate
  modified_base 23: mod_base = OTHER; note = 2'-O-methylguanosine
ttcggaagttttcagtactgatg

SEQ ID NO: 334 - RNA, 23 nt, synthetic construct
  source 1..23: mol_type = other RNA
  modified_base 1: mod_base = OTHER; note = 2'-O-methyluridine-3'-phosphorothioate 5'-(E)-Vinylphosphonate
  modified_base 2: mod_base = OTHER; note = 2'-deoxy-2'-fluoroguanosine-3'-phosphorothioate
  modified_base 3: mod_base = OTHER; note = 2'-O-methyluridine-3'-phosphate
  modified_base 4: mod_base = OTHER; note = 2'-O-methylcytidine-3'-phosphate
  modified_base 5: mod_base = OTHER; note = 2'-O-methylguanosine-3'-phosphate
  modified_base 6: mod_base = OTHER; note = 2'-deoxy-2'-fluoroguanosine-3'-phosphate
  modified_base 7: mod_base = OTHER; note = 2'-O-methyladenosine-3'-phosphate
  modified_base 8: mod_base = OTHER; note = 2'-deoxy-2'-fluoroadenosine-3'-phosphate
  modified_base 9: mod_base = OTHER; note = 2'-deoxy-2'-fluoroguanosine-3'-phosphate
  modified_base 10: mod_base = OTHER; note = 2'-O-methyluridine-3'-phosphate
  modified_base 11: mod_base = OTHER; note = 2'-O-methyluridine-3'-phosphate
  modified_base 12: mod_base = OTHER; note = 2'-O-methyluridine-3'-phosphate
  modified_base 13: mod_base = OTHER; note = 2'-O-methyluridine-3'-phosphate
  modified_base 14: mod_base = OTHER; note = 2'-deoxy-2'-fluorocytidine-3'-phosphate
  modified_base 15: mod_base = OTHER; note = 2'-O-methyladenosine-3'-phosphate
  modified_base 16: mod_base = OTHER; note = 2'-deoxy-2'-fluoroguanosine-3'-phosphate
  modified_base 17: mod_base = OTHER; note = 2'-O-methyluridine-3'-phosphate
  modified_base 18: mod_base = OTHER; note = 2'-O-methyladenosine-3'-phosphate
  modified_base 19: mod_base = OTHER; note = 2'-O-methylcytidine-3'-phosphate
  modified_base 20: mod_base = OTHER; note = 2'-O-methyluridine-3'-phosphate
  modified_base 21: mod_base = OTHER; note = 2'-O-methylguanosine-3'-phosphorothioate
  modified_base 22: mod_base = OTHER; note = 2'-O-methyladenosine-3'-phosphorothioate
  modified_base 23: mod_base = OTHER; note = 2'-O-methyluridine
tgtcggaagttttcagtactgat

SEQ ID NO: 335 - RNA, 23 nt, synthetic construct
  source 1..23: mol_type = other RNA
  modified_base 1: mod_base = OTHER; note = 2'-O-methyluridine-3'-phosphorothioate 5'-(E)-Vinylphosphonate
  modified_base 2: mod_base = OTHER; note = 2'-deoxy-2'-fluorouridine-3'-phosphorothioate
  modified_base 3: mod_base = OTHER; note = 2'-O-methyluridine-3'-phosphate
  modified_base 4: mod_base = OTHER; note = 2'-O-methyluridine-3'-phosphate
  modified_base 5: mod_base = OTHER; note = 2'-O-methylguanosine-3'-phosphate
  modified_base 6: mod_base = OTHER; note = 2'-deoxy-2'-fluoroguanosine-3'-phosphate
  modified_base 7: mod_base = OTHER; note = 2'-O-methyluridine-3'-phosphate
  modified_base 8: mod_base = OTHER; note = 2'-deoxy-2'-fluorocytidine-3'-phosphate
  modified_base 9: mod_base = OTHER; note = 2'-deoxy-2'-fluoroguanosine-3'-phosphate
  modified_base 10: mod_base = OTHER; note = 2'-O-methylguanosine-3'-phosphate
  modified_base 11: mod_base = OTHER; note = 2'-O-methyladenosine-3'-phosphate
  modified_base 12: mod_base = OTHER; note = 2'-O-methyladenosine-3'-phosphate
  modified_base 13: mod_base = OTHER; note = 2'-O-methylguanosine-3'-phosphate
  modified_base 14: mod_base = OTHER; note = 2'-deoxy-2'-fluorouridine-3'-phosphate
  modified_base 15: mod_base = OTHER; note = 2'-O-methyluridine-3'-phosphate
  modified_base 16: mod_base = OTHER; note = 2'-deoxy-2'-fluorouridine-3'-phosphate
  modified_base 17: mod_base = OTHER; note = 2'-O-methyluridine-3'-phosphate
  modified_base 18: mod_base = OTHER; note = 2'-O-methylcytidine-3'-phosphate
  modified_base 19: mod_base = OTHER; note = 2'-O-methyladenosine-3'-phosphate
  modified_base 20: mod_base = OTHER; note = 2'-O-methylguanosine-3'-phosphate
  modified_base 21: mod_base = OTHER; note = 2'-O-methyluridine-3'-phosphorothioate
  modified_base 22: mod_base = OTHER; note = 2'-O-methyladenosine-3'-phosphorothioate
  modified_base 23: mod_base = OTHER; note = 2'-O-methylcytidine
ttttggtcggaagttttcagtac

SEQ ID NO: 336 - RNA, 23 nt, synthetic construct
  source 1..23: mol_type = other RNA
  modified_base 1: mod_base = OTHER; note = 2'-O-methyluridine-3'-phosphorothioate 5'-(E)-Vinylphosphonate
  modified_base 2: mod_base = OTHER; note = 2'-deoxy-2'-fluoroadenosine-3'-phosphorothioate
  modified_base 3: mod_base = OTHER; note = 2'-O-methyluridine-3'-phosphate
  modified_base 4: mod_base = OTHER; note = 2'-O-methylcytidine-3'-phosphate
  modified_base 5: mod_base = OTHER; note = 2'-O-methyladenosine-3'-phosphate
  modified_base 6: mod_base = OTHER; note = 2'-deoxy-2'-fluoroadenosine-3'-phosphate
  modified_base 7: mod_base = OTHER; note = 2'-O-methyladenosine-3'-phosphate
  modified_base 8: mod_base = OTHER; note = 2'-deoxy-2'-fluoroguanosine-3'-phosphate
  modified_base 9: mod_base = OTHER; note = 2'-deoxy-2'-fluorouridine-3'-phosphate
  modified_base 10: mod_base = OTHER; note = 2'-O-methyluridine-3'-phosphate
  modified_base 11: mod_base = OTHER; note = 2'-O-methyluridine-3'-phosphate
  modified_base 12: mod_base = OTHER; note = 2'-O-methylguanosine-3'-phosphate
  modified_base 13: mod_base = OTHER; note = 2'-O-methylguanosine-3'-phosphate
  modified_base 14: mod_base = OTHER; note = 2'-deoxy-2'-fluorouridine-3'-phosphate
  modified_base 15: mod_base = OTHER; note = 2'-O-methylcytidine-3'-phosphate
  modified_base 16: mod_base = OTHER; note = 2'-deoxy-2'-fluoroguanosine-3'-phosphate
  modified_base 17: mod_base = OTHER; note = 2'-O-methylguanosine-3'-phosphate
  modified_base 18: mod_base = OTHER; note = 2'-O-methyladenosine-3'-phosphate
  modified_base 19: mod_base = OTHER; note = 2'-O-methyladenosine-3'-phosphate
  modified_base 20: mod_base = OTHER; note = 2'-O-methylguanosine-3'-phosphate
  modified_base 21: mod_base = OTHER; note = 2'-O-methyluridine-3'-phosphorothioate
  modified_base 22: mod_base = OTHER; note = 2'-O-methyluridine-3'-phosphorothioate
  modified_base 23: mod_base = OTHER; note = 2'-O-methyluridine
tatcaaagtttggtcggaagttt

SEQ ID NO: 337 - RNA, 23 nt, synthetic construct
  source 1..23: mol_type = other RNA
  modified_base 1: mod_base = OTHER; note = 2'-O-methyluridine-3'-phosphorothioate 5'-(E)-Vinylphosphonate
  modified_base 2: mod_base = OTHER; note = 2'-deoxy-2'-fluoroguanosine-3'-phosphorothioate
  modified_base 3: mod_base = OTHER; note = 2'-O-methyladenosine-3'-phosphate
  modified_base 4: mod_base = OTHER; note = 2'-O-methyladenosine-3'-phosphate
  modified_base 5: mod_base = OTHER; note = 2'-O-methyladenosine-3'-phosphate
  modified_base 6: mod_base = OTHER; note = 2'-deoxy-2'-fluorocytidine-3'-phosphate
  modified_base 7: mod_base = OTHER; note = 2'-O-methyladenosine-3'-phosphate
  modified_base 8: mod_base = OTHER; note = 2'-deoxy-2'-fluorouridine-3'-phosphate
  modified_base 9: mod_base = OTHER; note = 2'-deoxy-2'-fluorocytidine-3'-phosphate
  modified_base 10: mod_base = OTHER; note = 2'-O-methyladenosine-3'-phosphate
  modified_base 11: mod_base = OTHER; note = 2'-O-methyladenosine-3'-phosphate
  modified_base 12: mod_base = OTHER; note = 2'-O-methyladenosine-3'-phosphate
  modified_base 13: mod_base = OTHER; note = 2'-O-methylguanosine-3'-phosphate
  modified_base 14: mod_base = OTHER; note = 2'-deoxy-2'-fluorouridine-3'-phosphate
  modified_base 15: mod_base = OTHER; note = 2'-O-methyluridine-3'-phosphate
  modified_base 16: mod_base = OTHER; note = 2'-deoxy-2'-fluorouridine-3'-phosphate
  modified_base 17: mod_base = OTHER; note = 2'-O-methylguanosine-3'-phosphate
  modified_base 18: mod_base = OTHER; note = 2'-O-methylguanosine-3'-phosphate
  modified_base 19: mod_base = OTHER; note = 2'-O-methyluridine-3'-phosphate
  modified_base 20: mod_base = OTHER; note = 2'-O-methylcytidine-3'-phosphate
  modified_base 21: mod_base = OTHER; note = 2'-O-methylguanosine-3'-phosphorothioate
  modified_base 22: mod_base = OTHER; note = 2'-O-methylguanosine-3'-phosphorothioate
  modified_base 23: mod_base = OTHER; note = 2'-O-methyladenosine
tgaaacatcaaagtttggtcgga

SEQ ID NO: 338 - RNA, 23 nt, synthetic construct
  source 1..23: mol_type = other RNA
  modified_base 1: mod_base = OTHER; note = 2'-O-methyluridine-3'-phosphorothioate 5'-(E)-Vinylphosphonate
  modified_base 2: mod_base = OTHER; note = 2'-deoxy-2'-fluoroguanosine-3'-phosphorothioate
  modified_base 3: mod_base = OTHER; note = 2'-O-methylguanosine-3'-phosphate
  modified_base 4: mod_base = OTHER; note = 2'-O-methylguanosine-3'-phosphate
  modified_base 5: mod_base = OTHER; note = 2'-O-methyladenosine-3'-phosphate
  modified_base 6: mod_base = OTHER; note = 2'-deoxy-2'-fluorouridine-3'-phosphate
  modified_base 7: mod_base = OTHER; note = 2'-O-methylguanosine-3'-phosphate
  modified_base 8: mod_base = OTHER; note = 2'-deoxy-2'-fluoroadenosine-3'-phosphate
  modified_base 9: mod_base = OTHER; note = 2'-deoxy-2'-fluorouridine-3'-phosphate
  modified_base 10: mod_base = OTHER; note = 2'-O-methylcytidine-3'-phosphate
  modified_base 11: mod_base = OTHER; note = 2'-O-methylcytidine-3'-phosphate
  modified_base 12: mod_base = OTHER; note = 2'-O-methyluridine-3'-phosphate
  modified_base 13: mod_base = OTHER; note = 2'-O-methyluridine-3'-phosphate
  modified_base 14: mod_base = OTHER; note = 2'-deoxy-2'-fluoroadenosine-3'-phosphate
  modified_base 15: mod_base = OTHER; note = 2'-O-methylguanosine-3'-phosphate
  modified_base 16: mod_base = OTHER; note = 2'-deoxy-2'-fluoroadenosine-3'-phosphate
  modified_base 17: mod_base = OTHER; note = 2'-O-methyladenosine-3'-phosphate
  modified_base 18: mod_base = OTHER; note = 2'-O-methyladenosine-3'-phosphate
  modified_base 19: mod_base = OTHER; note = 2'-O-methyladenosine-3'-phosphate
  modified_base 20: mod_base = OTHER; note = 2'-O-methylguanosine-3'-phosphate
  modified_base 21: mod_base = OTHER; note = 2'-O-methyladenosine-3'-phosphorothioate
  modified_base 22: mod_base = OTHER; note = 2'-O-methylguanosine-3'-phosphorothioate
  modified_base 23: mod_base = OTHER; note = 2'-O-methylguanosine
tgggatgatccttagaaaagagg

SEQ ID NO: 339 - RNA, 23 nt, synthetic construct
  source 1..23: mol_type = other RNA
  modified_base 1: mod_base = OTHER; note = 2'-O-methyluridine-3'-phosphorothioate 5'-(E)-Vinylphosphonate
  modified_base 2: mod_base = OTHER; note = 2'-deoxy-2'-fluorouridine-3'-phosphorothioate
  modified_base 3: mod_base = OTHER; note = 2'-O-methylguanosine-3'-phosphate
  modified_base 4: mod_base = OTHER; note = 2'-O-methylguanosine-3'-phosphate
  modified_base 5: mod_base = OTHER; note = 2'-O-methylguanosine-3'-phosphate
  modified_base 6: mod_base = OTHER; note = 2'-deoxy-2'-fluoroadenosine-3'-phosphate
  modified_base 7: mod_base = OTHER; note = 2'-O-methyluridine-3'-phosphate
  modified_base 8: mod_base = OTHER; note = 2'-deoxy-2'-fluoroguanosine-3'-phosphate
  modified_base 9: mod_base = OTHER; note = 2'-deoxy-2'-fluoroadenosine-3'-phosphate
  modified_base 10: mod_base = OTHER; note = 2'-O-methyluridine-3'-phosphate
  modified_base 11: mod_base = OTHER; note = 2'-O-methylcytidine-3'-phosphate
  modified_base 12: mod_base = OTHER; note = 2'-O-methylcytidine-3'-phosphate
  modified_base 13: mod_base = OTHER; note = 2'-O-methyluridine-3'-phosphate
  modified_base 14: mod_base = OTHER; note = 2'-deoxy-2'-fluorouridine-3'-phosphate
  modified_base 15: mod_base = OTHER; note = 2'-O-methyladenosine-3'-phosphate
  modified_base 16: mod_base = OTHER; note = 2'-deoxy-2'-fluoroguanosine-3'-phosphate
  modified_base 17: mod_base = OTHER; note = 2'-O-methyladenosine-3'-phosphate
  modified_base 18: mod_base = OTHER; note = 2'-O-methyladenosine-3'-phosphate
  modified_base 19: mod_base = OTHER; note = 2'-O-methyladenosine-3'-phosphate
  modified_base 20: mod_base = OTHER; note = 2'-O-methyladenosine-3'-phosphate
  modified_base 21: mod_base = OTHER; note = 2'-O-methylguanosine-3'-phosphorothioate
  modified_base 22: mod_base = OTHER; note = 2'-O-methyladenosine-3'-phosphorothioate
  modified_base 23: mod_base = OTHER; note = 2'-O-methylguanosine
ttgggatgatccttagaaaagag

SEQ ID NO: 340 - RNA, 23 nt, synthetic construct
  source 1..23: mol_type = other RNA
  modified_base 1: mod_base = OTHER; note = 2'-O-methyluridine-3'-phosphorothioate 5'-(E)-Vinylphosphonate
  modified_base 2: mod_base = OTHER; note = 2'-deoxy-2'-fluoroadenosine-3'-phosphorothioate
  modified_base 3: mod_base = OTHER; note = 2'-O-methylcytidine-3'-phosphate
  modified_base 4: mod_base = OTHER; note = 2'-O-methylguanosine-3'-phosphate
  modified_base 5: mod_base = OTHER; note = 2'-O-methyluridine-3'-phosphate
  modified_base 6: mod_base = OTHER; note = 2'-deoxy-2'-fluoroguanosine-3'-phosphate
  modified_base 7: mod_base = OTHER; note = 2'-O-methyladenosine-3'-phosphate
  modified_base 8: mod_base = OTHER; note = 2'-deoxy-2'-fluorouridine-3'-phosphate
  modified_base 9: mod_base = OTHER; note = 2'-deoxy-2'-fluoroadenosine-3'-phosphate
  modified_base 10: mod_base = OTHER; note = 2'-O-methyluridine-3'-phosphate
  modified_base 11: mod_base = OTHER; note = 2'-O-methyladenosine-3'-phosphate
  modified_base 12: mod_base = OTHER; note = 2'-O-methyladenosine-3'-phosphate
  modified_base 13: mod_base = OTHER; note = 2'-O-methylguanosine-3'-phosphate
  modified_base 14: mod_base = OTHER; note = 2'-deoxy-2'-fluoroguanosine-3'-phosphate
  modified_base 15: mod_base = OTHER; note = 2'-O-methylcytidine-3'-phosphate
  modified_base 16: mod_base = OTHER; note = 2'-deoxy-2'-fluoroadenosine-3'-phosphate
  modified_base 17: mod_base = OTHER; note = 2'-O-methyluridine-3'-phosphate
  modified_base 18: mod_base = OTHER; note = 2'-O-methyluridine-3'-phosphate
  modified_base 19: mod_base = OTHER; note = 2'-O-methylcytidine-3'-phosphate
  modified_base 20: mod_base = OTHER; note = 2'-O-methylcytidine-3'-phosphate
  modified_base 21: mod_base = OTHER; note = 2'-O-methyluridine-3'-phosphorothioate
  modified_base 22: mod_base = OTHER; note = 2'-O-methylguanosine-3'-phosphorothioate
  modified_base 23: mod_base = OTHER; note = 2'-O-methylguanosine
tacgtgatataaggcattcctgg

SEQ ID NO: 341 - RNA, 23 nt, synthetic construct
  source 1..23: mol_type = other RNA
  modified_base 1: mod_base = OTHER; note = 2'-O-methyluridine-3'-phosphorothioate 5'-(E)-Vinylphosphonate
  modified_base 2: mod_base = OTHER; note = 2'-deoxy-2'-fluoroguanosine-3'-phosphorothioate
  modified_base 3: mod_base = OTHER; note = 2'-O-methyladenosine-3'-phosphate
  modified_base 4: mod_base = OTHER; note = 2'-O-methylcytidine-3'-phosphate
  modified_base 5: mod_base = OTHER; note = 2'-O-methylguanosine-3'-phosphate
  modified_base 6: mod_base = OTHER; note = 2'-deoxy-2'-fluorouridine-3'-phosphate
  modified_base 7: mod_base = OTHER; note = 2'-O-methylguanosine-3'-phosphate
  modified_base 8: mod_base = OTHER; note = 2'-deoxy-2'-fluoroadenosine-3'-phosphate
  modified_base 9: mod_base = OTHER; note = 2'-deoxy-2'-fluorouridine-3'-phosphate
  modified_base 10: mod_base = OTHER; note = 2'-O-methyladenosine-3'-phosphate
  modified_base 11: mod_base = OTHER; note = 2'-O-methyluridine-3'-phosphate
  modified_base 12: mod_base = OTHER; note = 2'-O-methyladenosine-3'-phosphate
  modified_base 13: mod_base = OTHER; note = 2'-O-methyladenosine-3'-phosphate
  modified_base 14: mod_base = OTHER; note = 2'-deoxy-2'-fluoroguanosine-3'-phosphate
  modified_base 15: mod_base = OTHER; note = 2'-O-methylguanosine-3'-phosphate
  modified_base 16: mod_base = OTHER; note = 2'-deoxy-2'-fluorocytidine-3'-phosphate
  modified_base 17: mod_base = OTHER; note = 2'-O-methyladenosine-3'-phosphate
  modified_base 18: mod_base = OTHER; note = 2'-O-methyluridine-3'-phosphate
  modified_base 19: mod_base = OTHER; note = 2'-O-methyluridine-3'-phosphate
  modified_base 20: mod_base = OTHER; note = 2'-O-methylcytidine-3'-phosphate
  modified_base 21: mod_base = OTHER; note = 2'-O-methylcytidine-3'-phosphorothioate
  modified_base 22: mod_base = OTHER; note = 2'-O-methyluridine-3'-phosphorothioate
  modified_base 23: mod_base = OTHER; note = 2'-O-methylguanosine
tgacgtgatataaggcattcctg

SEQ ID NO: 342 - RNA, 23 nt, synthetic construct
  source 1..23: mol_type = other RNA
  modified_base 1: mod_base = OTHER; note = 2'-O-methyluridine-3'-phosphorothioate 5'-(E)-Vinylphosphonate
  modified_base 2: mod_base = OTHER; note = 2'-deoxy-2'-fluorouridine-3'-phosphorothioate
  modified_base 3: mod_base = OTHER; note = 2'-O-methylguanosine-3'-phosphate
  modified_base 4: mod_base = OTHER; note = 2'-O-methylguanosine-3'-phosphate
  modified_base 5: mod_base = OTHER; note = 2'-O-methyladenosine-3'-phosphate
  modified_base 6: mod_base = OTHER; note = 2'-deoxy-2'-fluorocytidine-3'-phosphate
  modified_base 7: mod_base = OTHER; note = 2'-O-methylguanosine-3'-phosphate
  modified_base 8: mod_base = OTHER; note = 2'-deoxy-2'-fluorouridine-3'-phosphate
  modified_base 9: mod_base = OTHER; note = 2'-deoxy-2'-fluoroguanosine-3'-phosphate
  modified_base 10: mod_base = OTHER; note = 2'-O-methyladenosine-3'-phosphate
  modified_base 11: mod_base = OTHER; note = 2'-O-methyluridine-3'-phosphate
  modified_base 12: mod_base = OTHER; note = 2'-O-methyladenosine-3'-phosphate
  modified_base 13: mod_base = OTHER; note = 2'-O-methyluridine-3'-phosphate
  modified_base 14: mod_base = OTHER; note = 2'-deoxy-2'-fluoroadenosine-3'-phosphate
  modified_base 15: mod_base = OTHER; note = 2'-O-methyladenosine-3'-phosphate
  modified_base 16: mod_base = OTHER; note = 2'-deoxy-2'-fluoroguanosine-3'-phosphate
  modified_base 17: mod_base = OTHER; note = 2'-O-methylguanosine-3'-phosphate
  modified_base 18: mod_base = OTHER; note = 2'-O-methylcytidine-3'-phosphate
  modified_base 19: mod_base = OTHER; note = 2'-O-methyladenosine-3'-phosphate
  modified_base 20: mod_base = OTHER; note = 2'-O-methyluridine-3'-phosphate
  modified_base 21: mod_base = OTHER; note = 2'-O-methyluridine-3'-phosphorothioate
  modified_base 22: mod_base = OTHER; note = 2'-O-methylcytidine-3'-phosphorothioate
  modified_base 23: mod_base = OTHER; note = 2'-O-methylcytidine
ttggacgtgatataaggcattcc

SEQ ID NO: 343 - RNA, 23 nt, synthetic construct
  source 1..23: mol_type = other RNA
  modified_base 1: mod_base = OTHER; note = 2'-O-methyluridine-3'-phosphorothioate 5'-(E)-Vinylphosphonate
  modified_base 2: mod_base = OTHER; note = 2'-deoxy-2'-fluoroadenosine-3'-phosphorothioate
  modified_base 3: mod_base = OTHER; note = 2'-O-methyluridine-3'-phosphate
  modified_base 4: mod_base = OTHER; note = 2'-O-methylguanosine-3'-phosphate
  modified_base 5: mod_base = OTHER; note = 2'-O-methylguanosine-3'-phosphate
  modified_base 6: mod_base = OTHER; note = 2'-deoxy-2'-fluoroadenosine-3'-phosphate
  modified_base 7: mod_base = OTHER; note = 2'-O-methylcytidine-3'-phosphate
  modified_base 8: mod_base = OTHER; note = 2'-deoxy-2'-fluoroguanosine-3'-phosphate
  modified_base 9: mod_base = OTHER; note = 2'-deoxy-2'-fluorouridine-3'-phosphate
  modified_base 10: mod_base = OTHER; note = 2'-O-methylguanosine-3'-phosphate
  modified_base 11: mod_base = OTHER; note = 2'-O-methyladenosine-3'-phosphate
  modified_base 12: mod_base = OTHER; note = 2'-O-methyluridine-3'-phosphate
  modified_base 13: mod_base = OTHER; note = 2'-O-methyladenosine-3'-phosphate
  modified_base 14: mod_base = OTHER; note = 2'-deoxy-2'-fluorouridine-3'-phosphate
  modified_base 15: mod_base = OTHER; note = 2'-O-methyladenosine-3'-phosphate
  modified_base 16: mod_base = OTHER; note = 2'-deoxy-2'-fluoroadenosine-3'-phosphate
  modified_base 17: mod_base = OTHER; note = 2'-O-methylguanosine-3'-phosphate
  modified_base 18: mod_base = OTHER; note = 2'-O-methylguanosine-3'-phosphate
  modified_base 19: mod_base = OTHER; note = 2'-O-methylcytidine-3'-phosphate
  modified_base 20: mod_base = OTHER; note = 2'-O-methyladenosine-3'-phosphate
  modified_base 21: mod_base = OTHER; note = 2'-O-methyluridine-3'-phosphorothioate
  modified_base 22: mod_base = OTHER; note = 2'-O-methyluridine-3'-phosphorothioate
  modified_base 23: mod_base = OTHER; note = 2'-O-methylcytidine
tatggacgtgatataaggcattc

SEQ ID NO: 344 - RNA, 23 nt, synthetic construct
  source 1..23: mol_type = other RNA
  modified_base 1: mod_base = OTHER; note = 2'-O-methyluridine-3'-phosphorothioate 5'-(E)-Vinylphosphonate
  modified_base 2: mod_base = OTHER; note = 2'-deoxy-2'-fluorouridine-3'-phosphorothioate
  modified_base 3: mod_base = OTHER; note = 2'-O-methyladenosine-3'-phosphate
  modified_base 4: mod_base = OTHER; note = 2'-O-methyluridine-3'-phosphate
  modified_base 5: mod_base = OTHER; note = 2'-O-methylguanosine-3'-phosphate
  modified_base 6: mod_base = OTHER; note = 2'-deoxy-2'-fluoroguanosine-3'-phosphate
  modified_base 7: mod_base = OTHER; note = 2'-O-methyladenosine-3'-phosphate
  modified_base 8: mod_base = OTHER; note = 2'-deoxy-2'-fluorocytidine-3'-phosphate
  modified_base 9: mod_base = OTHER; note = 2'-deoxy-2'-fluoroguanosine-3'-phosphate
  modified_base 10: mod_base = OTHER; note = 2'-O-methyluridine-3'-phosphate
  modified_base 11: mod_base = OTHER; note = 2'-O-methylguanosine-3'-phosphate
  modified_base 12: mod_base = OTHER; note = 2'-O-methyladenosine-3'-phosphate
  modified_base 13: mod_base = OTHER; note = 2'-O-methyluridine-3'-phosphate
  modified_base 14: mod_base = OTHER; note = 2'-deoxy-2'-fluoroadenosine-3'-phosphate
  modified_base 15: mod_base = OTHER; note = 2'-O-methyluridine-3'-phosphate
  modified_base 16: mod_base = OTHER; note = 2'-deoxy-2'-fluoroadenosine-3'-phosphate
  modified_base 17: mod_base = OTHER; note = 2'-O-methyladenosine-3'-phosphate
  modified_base 18: mod_base = OTHER; note = 2'-O-methylguanosine-3'-phosphate
  modified_base 19: mod_base = OTHER; note = 2'-O-methylguanosine-3'-phosphate
  modified_base 20: mod_base = OTHER; note = 2'-O-methylcytidine-3'-phosphate
  modified_base 21: mod_base = OTHER; note = 2'-O-methyladenosine-3'-phosphorothioate
  modified_base 22: mod_base = OTHER; note = 2'-O-methyluridine-3'-phosphorothioate
  modified_base 23: mod_base = OTHER; note = 2'-O-methyluridine
ttatggacgtgatataaggcatt

SEQ ID NO: 345 - RNA, 23 nt, synthetic construct
  source 1..23: mol_type = other RNA
  modified_base 1: mod_base = OTHER; note = 2'-O-methyluridine-3'-phosphorothioate 5'-(E)-Vinylphosphonate
  modified_base 2: mod_base = OTHER; note = 2'-deoxy-2'-fluorouridine-3'-phosphorothioate
  modified_base 3: mod_base = OTHER; note = 2'-O-methyluridine-3'-phosphate
  modified_base 4: mod_base = OTHER; note = 2'-O-methyladenosine-3'-phosphate
  modified_base 5: mod_base = OTHER; note = 2'-O-methyluridine-3'-phosphate
  modified_base 6: mod_base = OTHER; note = 2'-deoxy-2'-fluoroguanosine-3'-phosphate
  modified_base 7: mod_base = OTHER; note = 2'-O-methylguanosine-3'-phosphate
  modified_base 8: mod_base = OTHER; note = 2'-deoxy-2'-fluoroadenosine-3'-phosphate
  modified_base 9: mod_base = OTHER; note = 2'-deoxy-2'-fluorocytidine-3'-phosphate
  modified_base 10: mod_base = OTHER; note = 2'-O-methylguanosine-3'-phosphate
  modified_base 11: mod_base = OTHER; note = 2'-O-methyluridine-3'-phosphate
  modified_base 12: mod_base = OTHER; note = 2'-O-methylguanosine-3'-phosphate
  modified_base 13: mod_base = OTHER; note = 2'-O-methyladenosine-3'-phosphate
  modified_base 14: mod_base = OTHER; note = 2'-deoxy-2'-fluorouridine-3'-phosphate
  modified_base 15: mod_base = OTHER; note = 2'-O-methyladenosine-3'-phosphate
  modified_base 16: mod_base = OTHER; note = 2'-deoxy-2'-fluorouridine-3'-phosphate
  modified_base 17: mod_base = OTHER; note = 2'-O-methyladenosine-3'-phosphate
  modified_base 18: mod_base = OTHER; note = 2'-O-methyladenosine-3'-phosphate
  modified_base 19: mod_base = OTHER; note = 2'-O-methylguanosine-3'-phosphate
  modified_base 20: mod_base = OTHER; note = 2'-O-methylguanosine-3'-phosphate
  modified_base 21: mod_base = OTHER; note = 2'-O-methylcytidine-3'-phosphorothioate
  modified_base 22: mod_base = OTHER; note = 2'-O-methyladenosine-3'-phosphorothioate
  modified_base 23: mod_base = OTHER; note = 2'-O-methyluridine
tttatggacgtgatataaggcat

SEQ ID NO: 346 - RNA, 23 nt, synthetic construct
  source 1..23: mol_type = other RNA
  modified_base 1: mod_base = OTHER; note = 2'-O-methyluridine-3'-phosphorothioate 5'-(E)-Vinylphosphonate
  modified_base 2: mod_base = OTHER; note = 2'-deoxy-2'-fluorocytidine-3'-phosphorothioate
  modified_base 3: mod_base = OTHER; note = 2'-O-methylguanosine-3'-phosphate
  modified_base 4: mod_base = OTHER; note = 2'-O-methyluridine-3'-phosphate
  modified_base 5: mod_base = OTHER; note = 2'-O-methyluridine-3'-phosphate
  modified_base 6: mod_base = OTHER; note = 2'-deoxy-2'-fluoroadenosine-3'-phosphate
  modified_base 7: mod_base = OTHER; note = 2'-O-methyluridine-3'-phosphate
  modified_base 8: mod_base = OTHER; note = 2'-deoxy-2'-fluoroguanosine-3'-phosphate
  modified_base 9: mod_base = OTHER; note = 2'-deoxy-2'-fluoroguanosine-3'-phosphate
  modified_base 10: mod_base = OTHER; note = 2'-O-methyladenosine-3'-phosphate
  modified_base 11: mod_base = OTHER; note = 2'-O-methylcytidine-3'-phosphate
  modified_base 12: mod_base = OTHER; note = 2'-O-methylguanosine-3'-phosphate
  modified_base 13: mod_base = OTHER; note = 2'-O-methyluridine-3'-phosphate
  modified_base 14: mod_base = OTHER; note = 2'-deoxy-2'-fluoroguanosine-3'-phosphate
  modified_base 15: mod_base = OTHER; note = 2'-O-methyladenosine-3'-phosphate
  modified_base 16: mod_base = OTHER; note = 2'-deoxy-2'-fluorouridine-3'-phosphate
  modified_base 17: mod_base = OTHER; note = 2'-O-methyladenosine-3'-phosphate
  modified_base 18: mod_base = OTHER; note = 2'-O-methyluridine-3'-phosphate
  modified_base 19: mod_base = OTHER; note = 2'-O-methyladenosine-3'-phosphate
  modified_base 20: mod_base = OTHER; note = 2'-O-methyladenosine-3'-phosphate
  modified_base 21: mod_base = OTHER; note = 2'-O-methylguanosine-3'-phosphorothioate
  modified_base 22: mod_base = OTHER; note = 2'-O-methylguanosine-3'-phosphorothioate
  modified_base 23: mod_base = OTHER; note = 2'-O-methylcytidine
tcgttatggacgtgatataaggc

SEQ ID NO: 347 - RNA, 23 nt, synthetic construct
  source 1..23: mol_type = other RNA
  modified_base 1: mod_base = OTHER; note = 2'-O-methyluridine-3'-phosphorothioate 5'-(E)-Vinylphosphonate
  modified_base 2: mod_base = OTHER; note = 2'-deoxy-2'-fluorocytidine-3'-phosphorothioate
  modified_base 3: mod_base = OTHER; note = 2'-O-methylcytidine-3'-phosphate
  modified_base 4: mod_base = OTHER; note = 2'-O-methylguanosine-3'-phosphate
  modified_base 5: mod_base = OTHER; note = 2'-O-methyluridine-3'-phosphate
  modified_base 6: mod_base = OTHER; note = 2'-deoxy-2'-fluorouridine-3'-phosphate
  modified_base 7: mod_base = OTHER; note = 2'-O-methyladenosine-3'-phosphate
  modified_base 8: mod_base = OTHER; note = 2'-deoxy-2'-fluorouridine-3'-phosphate
  modified_base 9: mod_base = OTHER; note = 2'-deoxy-2'-fluoroguanosine-3'-phosphate
  modified_base 10: mod_base = OTHER; note = 2'-O-methylguanosine-3'-phosphate
  modified_base 11: mod_base = OTHER; note = 2'-O-methyladenosine-3'-phosphate
  modified_base 12: mod_base = OTHER; note = 2'-O-methylcytidine-3'-phosphate
  modified_base 13: mod_base = OTHER; note = 2'-O-methylguanosine-3'-phosphate
  modified_base 14: mod_base = OTHER; note = 2'-deoxy-2'-fluorouridine-3'-phosphate
  modified_base 15: mod_base = OTHER; note = 2'-O-methylguanosine-3'-phosphate
  modified_base 16: mod_base = OTHER; note = 2'-deoxy-2'-fluoroadenosine-3'-phosphate
  modified_base 17: mod_base = OTHER; note = 2'-O-methyluridine-3'-phosphate
  modified_base 18: mod_base = OTHER; note = 2'-O-methyladenosine-3'-phosphate
  modified_base 19: mod_base = OTHER; note = 2'-O-methyluridine-3'-phosphate
  modified_base 20: mod_base = OTHER; note = 2'-O-methyladenosine-3'-phosphate
  modified_base 21: mod_base = OTHER; note = 2'-O-methyladenosine-3'-phosphorothioate
  modified_base 22: mod_base = OTHER; note = 2'-O-methylguanosine-3'-phosphorothioate
  modified_base 23: mod_base = OTHER; note = 2'-O-methylguanosine
tccgttatggacgtgatataagg

SEQ ID NO: 348 - RNA, 23 nt, synthetic construct
  source 1..23: mol_type = other RNA
  modified_base 1: mod_base = OTHER; note = 2'-O-methyluridine-3'-phosphorothioate 5'-(E)-Vinylphosphonate
  modified_base 2: mod_base = OTHER; note = 2'-deoxy-2'-fluoroadenosine-3'-phosphorothioate
  modified_base 3: mod_base = OTHER; note = 2'-O-methylguanosine-3'-phosphate
  modified_base 4: mod_base = OTHER; note = 2'-O-methylcytidine-3'-phosphate
  modified_base 5: mod_base = OTHER; note = 2'-O-methylguanosine-3'-phosphate
  modified_base 6: mod_base = OTHER; note = 2'-deoxy-2'-fluoroadenosine-3'-phosphate
  modified_base 7: mod_base = OTHER; note = 2'-O-methylguanosine-3'-phosphate
  modified_base 8: mod_base = OTHER; note = 2'-deoxy-2'-fluoroadenosine-3'-phosphate
  modified_base 9: mod_base = OTHER; note = 2'-deoxy-2'-fluoroadenosine-3'-phosphate
  modified_base 10: mod_base = OTHER; note = 2'-O-methyluridine-3'-phosphate
  modified_base 11: mod_base = OTHER; note = 2'-O-methylcytidine-3'-phosphate
  modified_base 12: mod_base = OTHER; note = 2'-O-methylcytidine-3'-phosphate
  modified_base 13: mod_base = OTHER; note = 2'-O-methyluridine-3'-phosphate
  modified_base 14: mod_base = OTHER; note = 2'-deoxy-2'-fluorouridine-3'-phosphate
  modified_base 15: mod_base = OTHER; note = 2'-O-methylguanosine-3'-phosphate
  modified_base 16: mod_base = OTHER; note = 2'-deoxy-2'-fluorouridine-3'-phosphate
  modified_base 17: mod_base = OTHER; note = 2'-O-methylguanosine-3'-phosphate
  modified_base 18: mod_base = OTHER; note = 2'-O-methylcytidine-3'-phosphate
  modified_base 19: mod_base = OTHER; note = 2'-O-methyluridine-3'-phosphate
  modified_base 20: mod_base = OTHER; note = 2'-O-methyluridine-3'-phosphate
  modified_base 21: mod_base = OTHER; note = 2'-O-methyluridine-3'-phosphorothioate
  modified_base 22: mod_base = OTHER; note = 2'-O-methyluridine-3'-phosphorothioate
  modified_base 23: mod_base = OTHER; note = 2'-O-methylguanosine
tagcgagaatccttgtgcttttg

SEQ ID NO: 349 - RNA, 23 nt, synthetic construct
  source 1..23: mol_type = other RNA
  modified_base 1: mod_base = OTHER; note = 2'-O-methyluridine-3'-phosphorothioate 5'-(E)-Vinylphosphonate
  modified_base 2: mod_base = OTHER; note = 2'-deoxy-2'-fluorocytidine-3'-phosphorothioate
  modified_base 3: mod_base = OTHER; note = 2'-O-methyladenosine-3'-phosphate
  modified_base 4: mod_base = OTHER; note = 2'-O-methyluridine-3'-phosphate
  modified_base 5: mod_base = OTHER; note = 2'-O-methyluridine-3'-phosphate
  modified_base 6: mod_base = OTHER; note = 2'-deoxy-2'-fluorouridine-3'-phosphate
  modified_base 7: mod_base = OTHER; note = 2'-O-methylcytidine-3'-phosphate
  modified_base 8: mod_base = OTHER; note = 2'-deoxy-2'-fluorocytidine-3'-phosphate
  modified_base 9: mod_base = OTHER; note = 2'-deoxy-2'-fluorocytidine-3'-phosphate
  modified_base 10: mod_base = OTHER; note = 2'-O-methylguanosine-3'-phosphate
  modified_base 11: mod_base = OTHER; note = 2'-O-methyladenosine-3'-phosphate
  modified_base 12: mod_base = OTHER; note = 2'-O-methyluridine-3'-phosphate
  modified_base 13: mod_base = OTHER; note = 2'-O-methyladenosine-3'-phosphate
  modified_base 14: mod_base = OTHER; note = 2'-deoxy-2'-fluoroadenosine-3'-phosphate
  modified_base 15: mod_base = OTHER; note = 2'-O-methyluridine-3'-phosphate
  modified_base 16: mod_base = OTHER; note = 2'-deoxy-2'-fluorocytidine-3'-phosphate
  modified_base 17: mod_base = OTHER; note = 2'-O-methyladenosine-3'-phosphate
  modified_base 18: mod_base = OTHER; note = 2'-O-methyluridine-3'-phosphate
  modified_base 19: mod_base = OTHER; note = 2'-O-methyladenosine-3'-phosphate
  modified_base 20: mod_base = OTHER; note = 2'-O-methyluridine-3'-phosphate
  modified_base 21: mod_base = OTHER; note = 2'-O-methyluridine-3'-phosphorothioate
  modified_base 22: mod_base = OTHER; note = 2'-O-methyluridine-3'-phosphorothioate
  modified_base 23: mod_base = OTHER; note = 2'-O-methylcytidine
tcatttcccgataatcatatttc

SEQ ID NO: 350 - RNA, 23 nt, synthetic construct
  source 1..23: mol_type = other RNA
  modified_base 1: mod_base = OTHER; note = 2'-O-methyluridine-3'-phosphorothioate 5'-(E)-Vinylphosphonate
  modified_base 2: mod_base = OTHER; note = 2'-deoxy-2'-fluoroguanosine-3'-phosphorothioate
  modified_base 3: mod_base = OTHER; note = 2'-O-methylcytidine-3'-phosphate
  modified_base 4: mod_base = OTHER; note = 2'-O-methyladenosine-3'-phosphate
  modified_base 5: mod_base = OTHER; note = 2'-O-methyluridine-3'-phosphate
  modified_base 6: mod_base = OTHER; note = 2'-deoxy-2'-fluorouridine-3'-phosphate
  modified_base 7: mod_base = OTHER; note = 2'-O-methyluridine-3'-phosphate
  modified_base 8: mod_base = OTHER; note = 2'-deoxy-2'-fluorocytidine-3'-phosphate
  modified_base 9: mod_base = OTHER; note = 2'-deoxy-2'-fluorocytidine-3'-phosphate
  modified_base 10: mod_base = OTHER; note = 2'-O-methylcytidine-3'-phosphate
  modified_base 11: mod_base = OTHER; note = 2'-O-methylguanosine-3'-phosphate
  modified_base 12: mod_base = OTHER; note = 2'-O-methyladenosine-3'-phosphate
  modified_base 13: mod_base = OTHER; note = 2'-O-methyluridine-3'-phosphate
  modified_base 14: mod_base = OTHER; note = 2'-deoxy-2'-fluoroadenosine-3'-phosphate
  modified_base 15: mod_base = OTHER; note = 2'-O-methyladenosine-3'-phosphate
  modified_base 16: mod_base = OTHER; note = 2'-deoxy-2'-fluorouridine-3'-phosphate
  modified_base 17: mod_base = OTHER; note = 2'-O-methylcytidine-3'-phosphate
  modified_base 18: mod_base = OTHER; note = 2'-O-methyladenosine-3'-phosphate
  modified_base 19: mod_base = OTHER; note = 2'-O-methyluridine-3'-phosphate
  modified_base 20: mod_base = OTHER; note = 2'-O-methyladenosine-3'-phosphate
  modified_base 21: mod_base = OTHER; note = 2'-O-methyluridine-3'-phosphorothioate
  modified_base 22: mod_base = OTHER; note = 2'-O-methyluridine-3'-phosphorothioate
  modified_base 23: mod_base = OTHER; note = 2'-O-methyluridine
tgcatttcccgataatcatattt

SEQ ID NO: 351 - RNA, 23 nt, synthetic construct
  source 1..23: mol_type = other RNA
  modified_base 1: mod_base = OTHER; note = 2'-O-methyluridine-3'-phosphorothioate 5'-(E)-Vinylphosphonate
  modified_base 2: mod_base = OTHER; note = 2'-deoxy-2'-fluorouridine-3'-phosphorothioate
  modified_base 3: mod_base = OTHER; note = 2'-O-methylcytidine-3'-phosphate
  modified_base 4: mod_base = OTHER; note = 2'-O-methyluridine-3'-phosphate
  modified_base 5: mod_base = OTHER; note = 2'-O-methylguanosine-3'-phosphate
  modified_base 6: mod_base = OTHER; note = 2'-deoxy-2'-fluorouridine-3'-phosphate
  modified_base 7: mod_base = OTHER; note = 2'-O-methyladenosine-3'-phosphate
  modified_base 8: mod_base = OTHER; note = 2'-deoxy-2'-fluoroadenosine-3'-phosphate
  modified_base 9: mod_base = OTHER; note = 2'-deoxy-2'-fluorouridine-3'-phosphate
  modified_base 10: mod_base = OTHER; note = 2'-O-methyladenosine-3'-phosphate
  modified_base 11: mod_base = OTHER; note = 2'-O-methylguanosine-3'-phosphate
  modified_base 12: mod_base = OTHER; note = 2'-O-methylcytidine-3'-phosphate
  modified_base 13: mod_base = OTHER; note = 2'-O-methyladenosine-3'-phosphate
  modified_base 14: mod_base = OTHER; note = 2'-deoxy-2'-fluoroadenosine-3'-phosphate
  modified_base 15: mod_base = OTHER; note = 2'-O-methyluridine-3'-phosphate
  modified_base 16: mod_base = OTHER; note = 2'-deoxy-2'-fluorocytidine-3'-phosphate
  modified_base 17: mod_base = OTHER; note = 2'-O-methyluridine-3'-phosphate
  modified_base 18: mod_base = OTHER; note = 2'-O-methylcytidine-3'-phosphate
  modified_base 19: mod_base = OTHER; note = 2'-O-methyluridine-3'-phosphate
  modified_base 20: mod_base = OTHER; note = 2'-O-methylcytidine-3'-phosphate
  modified_base 21: mod_base = OTHER; note = 2'-O-methyladenosine-3'-phosphorothioate
  modified_base 22: mod_base = OTHER; note = 2'-O-methyluridine-3'-phosphorothioate
  modified_base 23: mod_base = OTHER; note = 2'-O-methylcytidine
ttctgtaatagcaatctctcatc

SEQ ID NO: 352 - RNA, 23 nt, synthetic construct
  source 1..23: mol_type = other RNA
  modified_base 1: mod_base = OTHER; note = 2'-O-methyluridine-3'-phosphorothioate 5'-(E)-Vinylphosphonate
  modified_base 2: mod_base = OTHER; note = 2'-deoxy-2'-fluoroadenosine-3'-phosphorothioate
  modified_base 3: mod_base = OTHER; note = 2'-O-methyluridine-3'-phosphate
  modified_base 4: mod_base = OTHER; note = 2'-O-methylcytidine-3'-phosphate
  modified_base 5: mod_base = OTHER; note = 2'-O-methyluridine-3'-phosphate
  modified_base 6: mod_base = OTHER; note = 2'-deoxy-2'-fluoroguanosine-3'-phosphate
  modified_base 7: mod_base = OTHER; note = 2'-O-methyluridine-3'-phosphate
  modified_base 8: mod_base = OTHER; note = 2'-deoxy-2'-fluoroadenosine-3'-phosphate
  modified_base 9: mod_base = OTHER; note = 2'-deoxy-2'-fluoroadenosine-3'-phosphate
  modified_base 10: mod_base = OTHER; note = 2'-O-methyluridine-3'-phosphate
  modified_base 11: mod_base = OTHER; note = 2'-O-methyladenosine-3'-phosphate
  modified_base 12: mod_base = OTHER; note = 2'-O-methylguanosine-3'-phosphate
  modified_base 13: mod_base = OTHER; note = 2'-O-methylcytidine-3'-phosphate
  modified_base 14: mod_base = OTHER; note = 2'-deoxy-2'-fluoroadenosine-3'-phosphate
  modified_base 15: mod_base = OTHER; note = 2'-O-methyladenosine-3'-phosphate
  modified_base 16: mod_base = OTHER; note = 2'-deoxy-2'-fluorouridine-3'-phosphate
  modified_base 17: mod_base = OTHER; note = 2'-O-methylcytidine-3'-phosphate
  modified_base 18: mod_base = OTHER; note = 2'-O-methyluridine-3'-phosphate
  modified_base 19: mod_base = OTHER; note = 2'-O-methylcytidine-3'-phosphate
  modified_base 20: mod_base = OTHER; note = 2'-O-methyluridine-3'-phosphate
  modified_base 21: mod_base = OTHER; note = 2'-O-methylcytidine-3'-phosphorothioate
  modified_base 22: mod_base = OTHER; note = 2'-O-methyladenosine-3'-phosphorothioate
  modified_base 23: mod_base = OTHER; note = 2'-O-methyluridine
tatctgtaatagcaatctctcat

SEQ ID NO: 353 - RNA, 23 nt, synthetic construct
  source 1..23: mol_type = other RNA
  modified_base 1: mod_base = OTHER; note = 2'-O-methyluridine-3'-phosphorothioate 5'-(E)-Vinylphosphonate
  modified_base 2: mod_base = OTHER; note = 2'-deoxy-2'-fluorouridine-3'-phosphorothioate
  modified_base 3: mod_base = OTHER; note = 2'-O-methyladenosine-3'-phosphate
  modified_base 4: mod_base = OTHER; note = 2'-O-methylguanosine-3'-phosphate
  modified_base 5: mod_base = OTHER; note = 2'-O-methyladenosine-3'-phosphate
  modified_base 6: mod_base = OTHER; note = 2'-deoxy-2'-fluoroadenosine-3'-phosphate
  modified_base 7: mod_base = OTHER; note = 2'-O-methylguanosine-3'-phosphate
  modified_base 8: mod_base = OTHER; note = 2'-deoxy-2'-fluoroguanosine-3'-phosphate
  modified_base 9: mod_base = OTHER; note = 2'-deoxy-2'-fluoroadenosine-3'-phosphate
  modified_base 10: mod_base = OTHER; note = 2'-O-methyladenosine-3'-phosphate
  modified_base 11: mod_base = OTHER; note = 2'-O-methyluridine-3'-phosphate
  modified_base 12: mod_base = OTHER; note = 2'-O-methylcytidine-3'-phosphate
  modified_base 13: mod_base = OTHER; note = 2'-O-methyluridine-3'-phosphate
  modified_base 14: mod_base = OTHER; note = 2'-deoxy-2'-fluoroguanosine-3'-phosphate
  modified_base 15: mod_base = OTHER; note = 2'-O-methyluridine-3'-phosphate
  modified_base 16: mod_base = OTHER; note = 2'-deoxy-2'-fluoroadenosine-3'-phosphate
  modified_base 17: mod_base = OTHER; note = 2'-O-methyladenosine-3'-phosphate
  modified_base 18: mod_base = OTHER; note = 2'-O-methyluridine-3'-phosphate
  modified_base 19: mod_base = OTHER; note = 2'-O-methyladenosine-3'-phosphate
  modified_base 20: mod_base = OTHER; note = 2'-O-methylguanosine-3'-phosphate
  modified_base 21: mod_base = OTHER; note = 2'-O-methylcytidine-3'-phosphorothioate
  modified_base 22: mod_base = OTHER; note = 2'-O-methyladenosine-3'-phosphorothioate
  modified_base 23: mod_base = OTHER; note = 2'-O-methyladenosine
ttagaaggaatctgtaatagcaa

SEQ ID NO: 354 - RNA, 23 nt, synthetic construct
  source 1..23: mol_type = other RNA
  modified_base 1: mod_base = OTHER; note = 2'-O-methyluridine-3'-phosphorothioate 5'-(E)-Vinylphosphonate
  modified_base 2: mod_base = OTHER; note = 2'-deoxy-2'-fluoroguanosine-3'-phosphorothioate
  modified_base 3: mod_base = OTHER; note = 2'-O-methyladenosine-3'-phosphate
  modified_base 4: mod_base = OTHER; note = 2'-O-methyluridine-3'-phosphate
  modified_base 5: mod_base = OTHER; note = 2'-O-methyluridine-3'-phosphate
  modified_base 6: mod_base = OTHER; note = 2'-deoxy-2'-fluoroguanosine-3'-phosphate
  modified_base 7: mod_base = OTHER; note = 2'-O-methyluridine-3'-phosphate
  modified_base 8: mod_base = OTHER; note = 2'-deoxy-2'-fluoroadenosine-3'-phosphate
  modified_base 9: mod_base = OTHER; note = 2'-deoxy-2'-fluoroguanosine-3'-phosphate
  modified_base 10: mod_base = OTHER; note = 2'-O-methyladenosine-3'-phosphate
  modified_base 11: mod_base = OTHER; note = 2'-O-methyladenosine-3'-phosphate
  modified_base 12: mod_base = OTHER; note = 2'-O-methylguanosine-3'-phosphate
  modified_base 13: mod_base = OTHER; note = 2'-O-methylguanosine-3'-phosphate
  modified_base 14: mod_base = OTHER; note = 2'-deoxy-2'-fluoroadenosine-3'-phosphate
  modified_base 15: mod_base = OTHER; note = 2'-O-methyladenosine-3'-phosphate
  modified_base 16: mod_base = OTHER; note = 2'-deoxy-2'-fluorouridine-3'-phosphate
  modified_base 17: mod_base = OTHER; note = 2'-O-methylcytidine-3'-phosphate
  modified_base 18: mod_base = OTHER; note = 2'-O-methyluridine-3'-phosphate
  modified_base 19: mod_base = OTHER; note = 2'-O-methylguanosine-3'-phosphate
  modified_base 20: mod_base = OTHER; note = 2'-O-methyluridine-3'-phosphate
  modified_base 21: mod_base = OTHER; note = 2'-O-methyladenosine-3'-phosphorothioate
  modified_base 22: mod_base = OTHER; note = 2'-O-methyladenosine-3'-phosphorothioate
  modified_base 23: mod_base = OTHER; note = 2'-O-methyluridine
tgattgtagaaggaatctgtaat

SEQ ID NO: 355 - RNA, 23 nt, synthetic construct
  source 1..23: mol_type = other RNA
  modified_base 1: mod_base = OTHER; note = 2'-O-methyluridine-3'-phosphorothioate 5'-(E)-Vinylphosphonate
  modified_base 2: mod_base = OTHER; note = 2'-deoxy-2'-fluoroadenosine-3'-phosphorothioate
  modified_base 3: mod_base = OTHER; note = 2'-O-methylcytidine-3'-phosphate
  modified_base 4: mod_base = OTHER; note = 2'-O-methylcytidine-3'-phosphate
  modified_base 5: mod_base = OTHER; note = 2'-O-methyluridine-3'-phosphate
  modified_base 6: mod_base = OTHER; note = 2'-deoxy-2'-fluoroguanosine-3'-phosphate
  modified_base 7: mod_base = OTHER; note = 2'-O-methyladenosine-3'-phosphate
  modified_base 8: mod_base = OTHER; note = 2'-deoxy-2'-fluorouridine-3'-phosphate
  modified_base 9: mod_base = OTHER; note = 2'-deoxy-2'-fluorouridine-3'-phosphate
  modified_base 10: mod_base = OTHER; note = 2'-O-methylguanosine-3'-phosphate
  modified_base 11: mod_base = OTHER; note = 2'-O-methyluridine-3'-phosphate
  modified_base 12: mod_base = OTHER; note = 2'-O-methyladenosine-3'-phosphate
  modified_base 13: mod_base = OTHER; note = 2'-O-methylguanosine-3'-phosphate
  modified_base 14: mod_base = OTHER; note = 2'-deoxy-2'-fluoroadenosine-3'-phosphate
  modified_base 15: mod_base = OTHER; note = 2'-O-methyladenosine-3'-phosphate
  modified_base 16: mod_base = OTHER; note = 2'-deoxy-2'-fluoroguanosine-3'-phosphate
  modified_base 17: mod_base = OTHER; note = 2'-O-methylguanosine-3'-phosphate
  modified_base 18: mod_base = OTHER; note = 2'-O-methyladenosine-3'-phosphate
  modified_base 19: mod_base = OTHER; note = 2'-O-methyladenosine-3'-phosphate
  modified_base 20: mod_base = OTHER; note = 2'-O-methyluridine-3'-phosphate
  modified_base 21: mod_base = OTHER; note = 2'-O-methylcytidine-3'-phosphorothioate
  modified_base 22: mod_base = OTHER; note = 2'-O-methyluridine-3'-phosphorothioate
  modified_base 23: mod_base = OTHER; note = 2'-O-methylguanosine
tacctgattgtagaaggaatctg

SEQ ID NO: 356 - RNA, 23 nt, synthetic construct
  source 1..23: mol_type = other RNA
  modified_base 1: mod_base = OTHER; note = 2'-O-methyluridine-3'-phosphorothioate 5'-(E)-Vinylphosphonate
  modified_base 2: mod_base = OTHER; note = 2'-deoxy-2'-fluoroadenosine-3'-phosphorothioate
  modified_base 3: mod_base = OTHER; note = 2'-O-methyladenosine-3'-phosphate
  modified_base 4: mod_base = OTHER; note = 2'-O-methyluridine-3'-phosphate
  modified_base 5: mod_base = OTHER; note = 2'-O-methyladenosine-3'-phosphate
  modified_base 6: mod_base = OTHER; note = 2'-deoxy-2'-fluoroguanosine-3'-phosphate
  modified_base 7: mod_base = OTHER; note = 2'-O-methyladenosine-3'-phosphate
  modified_base 8: mod_base = OTHER; note = 2'-deoxy-2'-fluorocytidine-3'-phosphate
  modified_base 9: mod_base = OTHER; note = 2'-deoxy-2'-fluorocytidine-3'-phosphate
  modified_base 10: mod_base = OTHER; note = 2'-O-methyluridine-3'-phosphate
  modified_base 11: mod_base = OTHER; note = 2'-O-methylguanosine-3'-phosphate
  modified_base 12: mod_base = OTHER; note = 2'-O-methyladenosine-3'-phosphate
  modified_base 13: mod_base = OTHER; note = 2'-O-methyluridine-3'-phosphate
  modified_base 14: mod_base = OTHER; note = 2'-deoxy-2'-fluorouridine-3'-phosphate
  modified_base 15: mod_base = OTHER; note = 2'-O-methylguanosine-3'-phosphate
  modified_base 16: mod_base = OTHER; note = 2'-deoxy-2'-fluorouridine-3'-phosphate
  modified_base 17: mod_base = OTHER; note = 2'-O-methyladenosine-3'-phosphate
  modified_base 18: mod_base = OTHER; note = 2'-O-methylguanosine-3'-phosphate
  modified_base 19: mod_base = OTHER; note = 2'-O-methyladenosine-3'-phosphate
  modified_base 20: mod_base = OTHER; note = 2'-O-methyladenosine-3'-phosphate
  modified_base 21: mod_base = OTHER; note = 2'-O-methylguanosine-3'-phosphorothioate
  modified_base 22: mod_base = OTHER; note = 2'-O-methylguanosine-3'-phosphorothioate
  modified_base 23: mod_base = OTHER; note = 2'-O-methyladenosine
taatagacctgattgtagaagga

SEQ ID NO: 357 - RNA, 23 nt, synthetic construct
  source 1..23: mol_type = other RNA
  modified_base 1: mod_base = OTHER; note = 2'-O-methyluridine-3'-phosphorothioate 5'-(E)-Vinylphosphonate
  modified_base 2: mod_base = OTHER; note = 2'-deoxy-2'-fluoroguanosine-3'-phosphorothioate
  modified_base 3: mod_base = OTHER; note = 2'-O-methyladenosine-3'-phosphate
  modified_base 4: mod_base = OTHER; note = 2'-O-methyluridine-3'-phosphate
  modified_base 5: mod_base = OTHER; note = 2'-O-methylguanosine-3'-phosphate
  modified_base 6: mod_base = OTHER; note = 2'-deoxy-2'-fluoroadenosine-3'-phosphate
  modified_base 7: mod_base = OTHER; note = 2'-O-methyladenosine-3'-phosphate
  modified_base 8: mod_base = OTHER; note = 2'-deoxy-2'-fluorouridine-3'-phosphate
  modified_base 9: mod_base = OTHER; note = 2'-deoxy-2'-fluoroadenosine-3'-phosphate
  modified_base 10: mod_base = OTHER; note = 2'-O-methylguanosine-3'-phosphate
  modified_base 11: mod_base = OTHER; note = 2'-O-methyladenosine-3'-phosphate
  modified_base 12: mod_base = OTHER; note = 2'-O-methylcytidine-3'-phosphate
  modified_base 13: mod_base = OTHER; note = 2'-O-methylcytidine-3'-phosphate
  modified_base 14: mod_base = OTHER; note = 2'-deoxy-2'-fluorouridine-3'-phosphate
  modified_base 15: mod_base = OTHER; note = 2'-O-methylguanosine-3'-phosphate
  modified_base 16: mod_base = OTHER; note = 2'-deoxy-2'-fluoroadenosine-3'-phosphate
  modified_base 17: mod_base = OTHER; note = 2'-O-methyluridine-3'-phosphate
  modified_base 18: mod_base = OTHER; note = 2'-O-methyluridine-3'-phosphate
  modified_base 19: mod_base = OTHER; note = 2'-O-methylguanosine-3'-phosphate
  modified_base 20: mod_base = OTHER; note = 2'-O-methyluridine-3'-phosphate
  modified_base 21: mod_base = OTHER; note = 2'-O-methyladenosine-3'-phosphorothioate
  modified_base 22: mod_base = OTHER; note = 2'-O-methylguanosine-3'-phosphorothioate
  modified_base 23: mod_base = OTHER; note = 2'-O-methyladenosine
tgatgaatagacctgattgtaga

SEQ ID NO: 358 - RNA, 23 nt, synthetic construct
  source 1..23: mol_type = other RNA
  modified_base 1: mod_base = OTHER; note = 2'-O-methyluridine-3'-phosphorothioate 5'-(E)-Vinylphosphonate
  modified_base 2: mod_base = OTHER; note = 2'-deoxy-2'-fluorouridine-3'-phosphorothioate
  modified_base 3: mod_base = OTHER; note = 2'-O-methyluridine-3'-phosphate
  modified_base 4: mod_base = OTHER; note = 2'-O-methyladenosine-3'-phosphate
  modified_base 5: mod_base = OTHER; note = 2'-O-methyluridine-3'-phosphate
  modified_base 6: mod_base = OTHER; note = 2'-deoxy-2'-fluorocytidine-3'-phosphate
  modified_base 7: mod_base = OTHER; note = 2'-O-methylcytidine-3'-phosphate
  modified_base 8: mod_base = OTHER; note = 2'-deoxy-2'-fluorouridine-3'-phosphate
  modified_base 9: mod_base = OTHER; note = 2'-deoxy-2'-fluoroguanosine-3'-phosphate
  modified_base 10: mod_base = OTHER; note = 2'-O-methyladenosine-3'-phosphate
  modified_base 11: mod_base = OTHER; note = 2'-O-methyluridine-3'-phosphate
  modified_base 12: mod_base = OTHER; note = 2'-O-methylguanosine-3'-phosphate
  modified_base 13: mod_base = OTHER; note = 2'-O-methyladenosine-3'-phosphate
  modified_base 14: mod_base = OTHER; note = 2'-deoxy-2'-fluoroadenosine-3'-phosphate
  modified_base 15: mod_base = OTHER; note = 2'-O-methyluridine-3'-phosphate
  modified_base 16: mod_base = OTHER; note = 2'-deoxy-2'-fluoroadenosine-3'-phosphate
  modified_base 17: mod_base = OTHER; note = 2'-O-methylguanosine-3'-phosphate
  modified_base 18: mod_base = OTHER; note = 2'-O-methyladenosine-3'-phosphate
  modified_base 19: mod_base = OTHER; note = 2'-O-methylcytidine-3'-phosphate
  modified_base 20: mod_base = OTHER; note = 2'-O-methylcytidine-3'-phosphate
  modified_base 21: mod_base = OTHER; note = 2'-O-methyluridine-3'-phosphorothioate
  modified_base 22: mod_base = OTHER; note = 2'-O-methylguanosine-3'-phosphorothioate
  modified_base 23: mod_base = OTHER; note = 2'-O-methyladenosine
tttatcctgatgaatagacctga

SEQ ID NO: 359 - RNA, 23 nt, synthetic construct
  source 1..23: mol_type = other RNA
  modified_base 1: mod_base = OTHER; note = 2'-O-methyluridine-3'-phosphorothioate 5'-(E)-Vinylphosphonate
  modified_base 2: mod_base = OTHER; note = 2'-deoxy-2'-fluorocytidine-3'-phosphorothioate
  modified_base 3: mod_base = OTHER; note = 2'-O-methyladenosine-3'-phosphate
  modified_base 4: mod_base = OTHER; note = 2'-O-methyladenosine-3'-phosphate
  modified_base 5: mod_base = OTHER; note = 2'-O-methyluridine-3'-phosphate
  modified_base 6: mod_base = OTHER; note = 2'-deoxy-2'-fluorocytidine-3'-phosphate
  modified_base 7: mod_base = OTHER; note = 2'-O-methyluridine-3'-phosphate
  modified_base 8: mod_base = OTHER; note = 2'-deoxy-2'-fluorouridine-3'-phosphate
  modified_base 9: mod_base = OTHER; note = 2'-deoxy-2'-fluorocytidine-3'-phosphate
  modified_base 10: mod_base = OTHER; note = 2'-O-methyluridine-3'-phosphate
  modified_base 11: mod_base = OTHER; note = 2'-O-methylcytidine-3'-phosphate
  modified_base 12: mod_base = OTHER; note = 2'-O-methyladenosine-3'-phosphate
  modified_base 13: mod_base = OTHER; note = 2'-O-methyladenosine-3'-phosphate
  modified_base 14: mod_base = OTHER; note = 2'-deoxy-2'-fluorocytidine-3'-phosphate
  modified_base 15: mod_base = OTHER; note = 2'-O-methyluridine-3'-phosphate
  modified_base 16: mod_base = OTHER; note = 2'-deoxy-2'-fluoroguanosine-3'-phosphate
  modified_base 17: mod_base = OTHER; note = 2'-O-methyladenosine-3'-phosphate
  modified_base 18: mod_base = OTHER; note = 2'-O-methyladenosine-3'-phosphate
  modified_base 19: mod_base = OTHER; note = 2'-O-methylguanosine-3'-phosphate
  modified_base 20: mod_base = OTHER; note = 2'-O-methyladenosine-3'-phosphate
  modified_base 21: mod_base = OTHER; note = 2'-O-methyladenosine-3'-phosphorothioate
  modified_base 22: mod_base = OTHER; note = 2'-O-methyladenosine-3'-phosphorothioate
  modified_base 23: mod_base = OTHER; note = 2'-O-methyladenosine
tcaatcttctcaactgaagaaaa

SEQ ID NO: 360 - RNA, 23 nt, synthetic construct
  source 1..23: mol_type = other RNA
  modified_base 1: mod_base = OTHER; note = 2'-O-methyluridine-3'-phosphorothioate 5'-(E)-Vinylphosphonate
  modified_base 2: mod_base = OTHER; note = 2'-deoxy-2'-fluoroadenosine-3'-phosphorothioate
  modified_base 3: mod_base = OTHER; note = 2'-O-methylcytidine-3'-phosphate
  modified_base 4: mod_base = OTHER; note = 2'-O-methyladenosine-3'-phosphate
  modified_base 5: mod_base = OTHER; note = 2'-O-methyladenosine-3'-phosphate
  modified_base 6: mod_base = OTHER; note = 2'-deoxy-2'-fluorouridine-3'-phosphate
  modified_base 7: mod_base = OTHER; note = 2'-O-methylcytidine-3'-phosphate
  modified_base 8: mod_base = OTHER; note = 2'-deoxy-2'-fluorouridine-3'-phosphate
  modified_base 9: mod_base = OTHER; note = 2'-deoxy-2'-fluorouridine-3'-phosphate
  modified_base 10: mod_base = OTHER; note = 2'-O-methylcytidine-3'-phosphate
  modified_base 11: mod_base = OTHER; note = 2'-O-methyluridine-3'-phosphate
  modified_base 12: mod_base = OTHER; note = 2'-O-methylcytidine-3'-phosphate
  modified_base 13: mod_base = OTHER; note = 2'-O-methyladenosine-3'-phosphate
  modified_base 14: mod_base = OTHER; note = 2'-deoxy-2'-fluoroadenosine-3'-phosphate
  modified_base 15: mod_base = OTHER; note = 2'-O-methylcytidine-3'-phosphate
  modified_base 16: mod_base = OTHER; note = 2'-deoxy-2'-fluorouridine-3'-phosphate
  modified_base 17: mod_base = OTHER; note = 2'-O-methylguanosine-3'-phosphate
  modified_base 18: mod_base = OTHER; note = 2'-O-methyladenosine-3'-phosphate
  modified_base 19: mod_base = OTHER; note = 2'-O-methyladenosine-3'-phosphate
  modified_base 20: mod_base = OTHER; note = 2'-O-methylguanosine-3'-phosphate
  modified_base 21: mod_base = OTHER; note = 2'-O-methyladenosine-3'-phosphorothioate
  modified_base 22: mod_base = OTHER; note = 2'-O-methyladenosine-3'-phosphorothioate
  modified_base 23: mod_base = OTHER; note = 2'-O-methyladenosine
tacaatcttctcaactgaagaaa

SEQ ID NO: 361 - RNA, 23 nt, synthetic construct
  source 1..23: mol_type = other RNA
  modified_base 1: mod_base = OTHER; note = 2'-O-methyluridine-3'-phosphorothioate 5'-(E)-Vinylphosphonate
  modified_base 2: mod_base = OTHER; note = 2'-deoxy-2'-fluorouridine-3'-phosphorothioate
  modified_base 3: mod_base = OTHER; note = 2'-O-methyladenosine-3'-phosphate
  modified_base 4: mod_base = OTHER; note = 2'-O-methyladenosine-3'-phosphate
  modified_base 5: mod_base = OTHER; note = 2'-O-methyluridine-3'-phosphate
  modified_base 6: mod_base = OTHER; note = 2'-deoxy-2'-fluoroadenosine-3'-phosphate
  modified_base 7: mod_base = OTHER; note = 2'-O-methylcytidine-3'-phosphate
  modified_base 8: mod_base = OTHER; note = 2'-deoxy-2'-fluoroadenosine-3'-phosphate
  modified_base 9: mod_base = OTHER; note = 2'-deoxy-2'-fluoroadenosine-3'-phosphate
  modified_base 10: mod_base = OTHER; note = 2'-O-methyluridine-3'-phosphate
  modified_base 11: mod_base = OTHER; note = 2'-O-methylcytidine-3'-phosphate
  modified_base 12: mod_base = OTHER; note = 2'-O-methyluridine-3'-phosphate
  modified_base 13: mod_base = OTHER; note = 2'-O-methyluridine-3'-phosphate
  modified_base 14: mod_base = OTHER; note = 2'-deoxy-2'-fluorocytidine-3'-phosphate
  modified_base 15: mod_base = OTHER; note = 2'-O-methyluridine-3'-phosphate
  modified_base 16: mod_base = OTHER; note = 2'-deoxy-2'-fluorocytidine-3'-phosphate
  modified_base 17: mod_base = OTHER; note = 2'-O-methyladenosine-3'-phosphate
  modified_base 18: mod_base = OTHER; note = 2'-O-methyladenosine-3'-phosphate
  modified_base 19: mod_base = OTHER; note = 2'-O-methylcytidine-3'-phosphate
  modified_base 20: mod_base = OTHER; note = 2'-O-methyluridine-3'-phosphate
  modified_base 21: mod_base = OTHER; note = 2'-O-methylguanosine-3'-phosphorothioate
  modified_base 22: mod_base = OTHER; note = 2'-O-methyladenosine-3'-phosphorothioate
  modified_base 23: mod_base = OTHER; note = 2'-O-methyladenosine
ttaatacaatcttctcaactgaa

SEQ ID NO: 362 - RNA, 23 nt, synthetic construct
  source 1..23: mol_type = other RNA
  modified_base 1: mod_base = OTHER; note = 2'-O-methyluridine-3'-phosphorothioate 5'-(E)-Vinylphosphonate
  modified_base 2: mod_base = OTHER; note = 2'-deoxy-2'-fluoroguanosine-3'-phosphorothioate
  modified_base 3: mod_base = OTHER; note = 2'-O-methyluridine-3'-phosphate
  modified_base 4: mod_base = OTHER; note = 2'-O-methyluridine-3'-phosphate
  modified_base 5: mod_base = OTHER; note = 2'-O-methyladenosine-3'-phosphate
  modified_base 6: mod_base = OTHER; note = 2'-deoxy-2'-fluoroadenosine-3'-phosphate
  modified_base 7: mod_base = OTHER; note = 2'-O-methyluridine-3'-phosphate
  modified_base 8: mod_base = OTHER; note = 2'-deoxy-2'-fluoroadenosine-3'-phosphate
  modified_base 9: mod_base = OTHER; note = 2'-deoxy-2'-fluorocytidine-3'-phosphate
  modified_base 10: mod_base = OTHER; note = 2'-O-methyladenosine-3'-phosphate
  modified_base 11: mod_base = OTHER; note = 2'-O-methyladenosine-3'-phosphate
  modified_base 12: mod_base = OTHER; note = 2'-O-methyluridine-3'-phosphate
  modified_base 13: mod_base = OTHER; note = 2'-O-methylcytidine-3'-phosphate
  modified_base 14: mod_base = OTHER; note = 2'-deoxy-2'-fluorouridine-3'-phosphate
  modified_base 15: mod_base = OTHER; note = 2'-O-methyluridine-3'-phosphate
  modified_base 16: mod_base = OTHER; note = 2'-deoxy-2'-fluorocytidine-3'-phosphate
  modified_base 17: mod_base = OTHER; note = 2'-O-methyluridine-3'-phosphate
  modified_base 18: mod_base = OTHER; note = 2'-O-methylcytidine-3'-phosphate
  modified_base 19: mod_base = OTHER; note = 2'-O-methyladenosine-3'-phosphate
  modified_base 20: mod_base = OTHER; note = 2'-O-methyladenosine-3'-phosphate
  modified_base 21: mod_base = OTHER; note = 2'-O-methylcytidine-3'-phosphorothioate
  modified_base 22: mod_base = OTHER; note = 2'-O-methyluridine-3'-phosphorothioate
  modified_base 23: mod_base = OTHER; note = 2'-O-methylguanosine
tgttaatacaatcttctcaactg

SEQ ID NO: 363 - RNA, 23 nt, synthetic construct
  source 1..23: mol_type = other RNA
  modified_base 1: mod_base = OTHER; note = 2'-O-methyluridine-3'-phosphorothioate 5'-(E)-Vinylphosphonate
  modified_base 2: mod_base = OTHER; note = 2'-deoxy-2'-fluoroadenosine-3'-phosphorothioate
  modified_base 3: mod_base = OTHER; note = 2'-O-methylguanosine-3'-phosphate
  modified_base 4: mod_base = OTHER; note = 2'-O-methyluridine-3'-phosphate
  modified_base 5: mod_base = OTHER; note = 2'-O-methylguanosine-3'-phosphate
  modified_base 6: mod_base = OTHER; note = 2'-deoxy-2'-fluorouridine-3'-phosphate
  modified_base 7: mod_base = OTHER; note = 2'-O-methyladenosine-3'-phosphate
  modified_base 8: mod_base = OTHER; note = 2'-deoxy-2'-fluoroguanosine-3'-phosphate
  modified_base 9: mod_base = OTHER; note = 2'-deoxy-2'-fluorouridine-3'-phosphate
  modified_base 10: mod_base = OTHER; note = 2'-O-methyluridine-3'-phosphate
  modified_base 11: mod_base = OTHER; note = 2'-O-methyladenosine-3'-phosphate
  modified_base 12: mod_base = OTHER; note = 2'-O-methyladenosine-3'-phosphate
  modified_base 13: mod_base = OTHER; note = 2'-O-methyluridine-3'-phosphate
  modified_base 14: mod_base = OTHER; note = 2'-deoxy-2'-fluoroadenosine-3'-phosphate
  modified_base 15: mod_base = OTHER; note = 2'-O-methylcytidine-3'-phosphate
  modified_base 16: mod_base = OTHER; note = 2'-deoxy-2'-fluoroadenosine-3'-phosphate
  modified_base 17: mod_base = OTHER; note = 2'-O-methyladenosine-3'-phosphate
  modified_base 18: mod_base = OTHER; note = 2'-O-methyluridine-3'-phosphate
  modified_base 19: mod_base = OTHER; note = 2'-O-methylcytidine-3'-phosphate
  modified_base 20: mod_base = OTHER; note = 2'-O-methyluridine-3'-phosphate
  modified_base 21: mod_base = OTHER; note = 2'-O-methyluridine-3'-phosphorothioate
  modified_base 22: mod_base = OTHER; note = 2'-O-methylcytidine-3'-phosphorothioate
  modified_base 23: mod_base = OTHER; note = 2'-O-methyluridine
tagtgtagttaatacaatcttct

SEQ ID NO: 364 - RNA, 23 nt, synthetic construct
  source 1..23: mol_type = other RNA
  modified_base 1: mod_base = OTHER; note = 2'-O-methyluridine-3'-phosphorothioate 5'-(E)-Vinylphosphonate
  modified_base 2: mod_base = OTHER; note = 2'-deoxy-2'-fluorocytidine-3'-phosphorothioate
  modified_base 3: mod_base = OTHER; note = 2'-O-methyluridine-3'-phosphate
  modified_base 4: mod_base = OTHER; note = 2'-O-methylcytidine-3'-phosphate
  modified_base 5: mod_base = OTHER; note = 2'-O-methyluridine-3'-phosphate
  modified_base 6: mod_base = OTHER; note = 2'-deoxy-2'-fluoroadenosine-3'-phosphate
  modified_base 7: mod_base = OTHER; note = 2'-O-methylguanosine-3'-phosphate
  modified_base 8: mod_base = OTHER; note = 2'-deoxy-2'-fluorouridine-3'-phosphate
  modified_base 9: mod_base = OTHER; note = 2'-deoxy-2'-fluoroguanosine-3'-phosphate
  modified_base 10: mod_base = OTHER; note = 2'-O-methyluridine-3'-phosphate
  modified_base 11: mod_base = OTHER; note = 2'-O-methyladenosine-3'-phosphate
  modified_base 12: mod_base = OTHER; note = 2'-O-methylguanosine-3'-phosphate
  modified_base 13: mod_base = OTHER; note = 2'-O-methyluridine-3'-phosphate
  modified_base 14: mod_base = OTHER; note = 2'-deoxy-2'-fluorouridine-3'-phosphate
  modified_base 15: mod_base = OTHER; note = 2'-O-methyladenosine-3'-phosphate
  modified_base 16: mod_base = OTHER; note = 2'-deoxy-2'-fluoroadenosine-3'-phosphate
  modified_base 17: mod_base = OTHER; note = 2'-O-methyluridine-3'-phosphate
  modified_base 18: mod_base = OTHER; note = 2'-O-methyladenosine-3'-phosphate
  modified_base 19: mod_base = OTHER; note = 2'-O-methylcytidine-3'-phosphate
  modified_base 20: mod_base = OTHER; note = 2'-O-methyladenosine-3'-phosphate
  modified_base 21: mod_base = OTHER; note = 2'-O-methyladenosine-3'-phosphorothioate
  modified_base 22: mod_base = OTHER; note = 2'-O-methyluridine-3'-phosphorothioate
  modified_base 23: mod_base = OTHER; note = 2'-O-methylcytidine
tctctagtgtagttaatacaatc

SEQ ID NO: 365 - RNA, 23 nt, synthetic construct
  source 1..23: mol_type = other RNA
  modified_base 1: mod_base = OTHER; note = 2'-O-methyluridine-3'-phosphorothioate 5'-(E)-Vinylphosphonate
  modified_base 2: mod_base = OTHER; note = 2'-deoxy-2'-fluoroadenosine-3'-phosphorothioate
  modified_base 3: mod_base = OTHER; note = 2'-O-methyluridine-3'-phosphate
  modified_base 4: mod_base = OTHER; note = 2'-O-methylcytidine-3'-phosphate
  modified_base 5: mod_base = OTHER; note = 2'-O-methyluridine-3'-phosphate
  modified_base 6: mod_base = OTHER; note = 2'-deoxy-2'-fluorocytidine-3'-phosphate
  modified_base 7: mod_base = OTHER; note = 2'-O-methyluridine-3'-phosphate
  modified_base 8: mod_base = OTHER; note = 2'-deoxy-2'-fluoroadenosine-3'-phosphate
  modified_base 9: mod_base = OTHER; note = 2'-deoxy-2'-fluoroguanosine-3'-phosphate
  modified_base 10: mod_base = OTHER; note = 2'-O-methyluridine-3'-phosphate
  modified_base 11: mod_base = OTHER; note = 2'-O-methylguanosine-3'-phosphate
  modified_base 12: mod_base = OTHER; note = 2'-O-methyluridine-3'-phosphate
  modified_base 13: mod_base = OTHER; note = 2'-O-methyladenosine-3'-phosphate
  modified_base 14: mod_base = OTHER; note = 2'-deoxy-2'-fluoroguanosine-3'-phosphate
  modified_base 15: mod_base = OTHER; note = 2'-O-methyluridine-3'-phosphate
  modified_base 16: mod_base = OTHER; note = 2'-deoxy-2'-fluorouridine-3'-phosphate
  modified_base 17: mod_base = OTHER; note = 2'-O-methyladenosine-3'-phosphate
  modified_base 18: mod_base = OTHER; note = 2'-O-methyladenosine-3'-phosphate
  modified_base 19: mod_base = OTHER; note = 2'-O-methyluridine-3'-phosphate
  modified_base 20: mod_base = OTHER; note = 2'-O-methyladenosine-3'-phosphate
  modified_base 21: mod_base = OTHER; note = 2'-O-methylcytidine-3'-phosphorothioate
  modified_base 22: mod_base = OTHER; note = 2'-O-methyladenosine-3'-phosphorothioate
  modified_base 23: mod_base = OTHER; note = 2'-O-methyladenosine
tatctctagtgtagttaatacaa

SEQ ID NO: 366 - RNA, 23 nt, synthetic construct
  source 1..23: mol_type = other RNA
  modified_base 1: mod_base = OTHER; note = 2'-O-methyluridine-3'-phosphorothioate 5'-(E)-Vinylphosphonate
  modified_base 2: mod_base = OTHER; note = 2'-deoxy-2'-fluoroadenosine-3'-phosphorothioate
  modified_base 3: mod_base = OTHER; note = 2'-O-methyladenosine-3'-phosphate
  modified_base 4: mod_base = OTHER; note = 2'-O-methyluridine-3'-phosphate
  modified_base 5: mod_base = OTHER; note = 2'-O-methylcytidine-3'-phosphate
  modified_base 6: mod_base = OTHER; note = 2'-deoxy-2'-fluorouridine-3'-phosphate
  modified_base 7: mod_base = OTHER; note = 2'-O-methylcytidine-3'-phosphate
  modified_base 8: mod_base = OTHER; note = 2'-deoxy-2'-fluorouridine-3'-phosphate
  modified_base 9: mod_base = OTHER; note = 2'-deoxy-2'-fluoroadenosine-3'-phosphate
  modified_base 10: mod_base = OTHER; note = 2'-O-methylguanosine-3'-phosphate
  modified_base 11: mod_base = OTHER; note = 2'-O-methyluridine-3'-phosphate
  modified_base 12: mod_base = OTHER; note = 2'-O-methylguanosine-3'-phosphate
  modified_base 13: mod_base = OTHER; note = 2'-O-methyluridine-3'-phosphate
  modified_base 14: mod_base = OTHER; note = 2'-deoxy-2'-fluoroadenosine-3'-phosphate
  modified_base 15: mod_base = OTHER; note = 2'-O-methylguanosine-3'-phosphate
  modified_base 16: mod_base = OTHER; note = 2'-deoxy-2'-fluorouridine-3'-phosphate
  modified_base 17: mod_base = OTHER; note = 2'-O-methyluridine-3'-phosphate
  modified_base 18: mod_base = OTHER; note = 2'-O-methyladenosine-3'-phosphate
  modified_base 19: mod_base = OTHER; note = 2'-O-methyladenosine-3'-phosphate
  modified_base 20: mod_base = OTHER; note = 2'-O-methyluridine-3'-phosphate
  modified_base 21: mod_base = OTHER; note = 2'-O-methyladenosine-3'-phosphorothioate
  modified_base 22: mod_base = OTHER; note = 2'-O-methylcytidine-3'-phosphorothioate
  modified_base 23: mod_base = OTHER; note = 2'-O-methyladenosine
taatctctagtgtagttaataca

SEQ ID NO: 367 - RNA, 23 nt, synthetic construct
  source 1..23: mol_type = other RNA
  modified_base 1: mod_base = OTHER; note = 2'-O-methyluridine-3'-phosphorothioate 5'-(E)-Vinylphosphonate
  modified_base 2: mod_base = OTHER; note = 2'-deoxy-2'-fluorocytidine-3'-phosphorothioate
  modified_base 3: mod_base = OTHER; note = 2'-O-methylguanosine-3'-phosphate
  modified_base 4: mod_base = OTHER; note = 2'-O-methyluridine-3'-phosphate
  modified_base 5: mod_base = OTHER; note = 2'-O-methylguanosine-3'-phosphate
  modified_base 6: mod_base = OTHER; note = 2'-deoxy-2'-fluoroadenosine-3'-phosphate
  modified_base 7: mod_base = OTHER; note = 2'-O-methyluridine-3'-phosphate
  modified_base 8: mod_base = OTHER; note = 2'-deoxy-2'-fluoroadenosine-3'-phosphate
  modified_base 9: mod_base = OTHER; note = 2'-deoxy-2'-fluorouridine-3'-phosphate
  modified_base 10: mod_base = OTHER; note = 2'-O-methylguanosine-3'-phosphate
  modified_base 11: mod_base = OTHER; note = 2'-O-methyluridine-3'-phosphate
  modified_base 12: mod_base = OTHER; note = 2'-O-methylguanosine-3'-phosphate
  modified_base 13: mod_base = OTHER; note = 2'-O-methylcytidine-3'-phosphate
  modified_base 14: mod_base = OTHER; note = 2'-deoxy-2'-fluorouridine-3'-phosphate
  modified_base 15: mod_base = OTHER; note = 2'-O-methyluridine-3'-phosphate
  modified_base 16: mod_base = OTHER; note = 2'-deoxy-2'-fluoroguanosine-3'-phosphate
  modified_base 17: mod_base = OTHER; note = 2'-O-methyladenosine-3'-phosphate
  modified_base 18: mod_base = OTHER; note = 2'-O-methyladenosine-3'-phosphate
  modified_base 19: mod_base = OTHER; note = 2'-O-methyluridine-3'-phosphate
  modified_base 20: mod_base = OTHER; note = 2'-O-methyladenosine-3'-phosphate
  modified_base 21: mod_base = OTHER; note = 2'-O-methyluridine-3'-phosphorothioate
  modified_base 22: mod_base = OTHER; note = 2'-O-methyluridine-3'-phosphorothioate
  modified_base 23: mod_base = OTHER; note = 2'-O-methylcytidine
tcgtgatatgtgcttgaatattc

SEQ ID NO: 368 - RNA, 23 nt, synthetic construct
  source 1..23: mol_type = other RNA
  modified_base 1: mod_base = OTHER; note = 2'-O-methyluridine-3'-phosphorothioate 5'-(E)-Vinylphosphonate
  modified_base 2: mod_base = OTHER; note = 2'-deoxy-2'-fluorouridine-3'-phosphorothioate
  modified_base 3: mod_base = OTHER; note = 2'-O-methyladenosine-3'-phosphate
  modified_base 4: mod_base = OTHER; note = 2'-O-methylcytidine-3'-phosphate
  modified_base 5: mod_base = OTHER; note = 2'-O-methylguanosine-3'-phosphate
  modified_base 6: mod_base = OTHER; note = 2'-deoxy-2'-fluorouridine-3'-phosphate
  modified_base 7: mod_base = OTHER; note = 2'-O-methylguanosine-3'-phosphate
  modified_base 8: mod_base = OTHER; note = 2'-deoxy-2'-fluoroadenosine-3'-phosphate
  modified_base 9: mod_base = OTHER; note = 2'-deoxy-2'-fluorouridine-3'-phosphate
  modified_base 10: mod_base = OTHER; note = 2'-O-methyladenosine-3'-phosphate
  modified_base 11: mod_base = OTHER; note = 2'-O-methyluridine-3'-phosphate
  modified_base 12: mod_base = OTHER; note = 2'-O-methylguanosine-3'-phosphate
  modified_base 13: mod_base = OTHER; note = 2'-O-methyluridine-3'-phosphate
  modified_base 14: mod_base = OTHER; note = 2'-deoxy-2'-fluoroguanosine-3'-phosphate
  modified_base 15: mod_base = OTHER; note = 2'-O-methylcytidine-3'-phosphate
  modified_base 16: mod_base = OTHER; note = 2'-deoxy-2'-fluorouridine-3'-phosphate
  modified_base 17: mod_base = OTHER; note = 2'-O-methyluridine-3'-phosphate
  modified_base 18: mod_base = OTHER; note = 2'-O-methylguanosine-3'-phosphate
  modified_base 19: mod_base = OTHER; note = 2'-O-methyladenosine-3'-phosphate
  modified_base 20: mod_base = OTHER; note = 2'-O-methyladenosine-3'-phosphate
  modified_base 21: mod_base = OTHER; note = 2'-O-methyluridine-3'-phosphorothioate
  modified_base 22: mod_base = OTHER; note = 2'-O-methyladenosine-3'-phosphorothioate
  modified_base 23: mod_base = OTHER; note = 2'-O-methyluridine
ttacgtgatatgtgcttgaatat

SEQ ID NO: 369 - RNA, 23 nt, synthetic construct
  source 1..23: mol_type = other RNA
  modified_base 1: mod_base = OTHER; note = 2'-O-methyluridine-3'-phosphorothioate 5'-(E)-Vinylphosphonate
  modified_base 2: mod_base = OTHER; note = 2'-deoxy-2'-fluorouridine-3'-phosphorothioate
  modified_base 3: mod_base = OTHER; note = 2'-O-methyluridine-3'-phosphate
  modified_base 4: mod_base = OTHER; note = 2'-O-methyladenosine-3'-phosphate
  modified_base 5: mod_base = OTHER; note = 2'-O-methylcytidine-3'-phosphate
  modified_base 6: mod_base = OTHER; note = 2'-deoxy-2'-fluoroguanosine-3'-phosphate
  modified_base 7: mod_base = OTHER; note = 2'-O-methyluridine-3'-phosphate
  modified_base 8: mod_base = OTHER; note = 2'-deoxy-2'-fluoroguanosine-3'-phosphate
  modified_base 9: mod_base = OTHER; note = 2'-deoxy-2'-fluoroadenosine-3'-phosphate
  modified_base 10: mod_base = OTHER; note = 2'-O-methyluridine-3'-phosphate
  modified_base 11: mod_base = OTHER; note = 2'-O-methyladenosine-3'-phosphate
  modified_base 12: mod_base = OTHER; note = 2'-O-methyluridine-3'-phosphate
  modified_base 13: mod_base = OTHER; note = 2'-O-methylguanosine-3'-phosphate
  modified_base 14: mod_base = OTHER; note = 2'-deoxy-2'-fluorouridine-3'-phosphate
  modified_base 15: mod_base = OTHER; note = 2'-O-methylguanosine-3'-phosphate
  modified_base 16: mod_base = OTHER; note = 2'-deoxy-2'-fluorocytidine-3'-phosphate
  modified_base 17: mod_base = OTHER; note = 2'-O-methyluridine-3'-phosphate
  modified_base 18: mod_base = OTHER; note = 2'-O-methyluridine-3'-phosphate
  modified_base 19: mod_base = OTHER; note = 2'-O-methylguanosine-3'-phosphate
  modified_base 20: mod_base = OTHER; note = 2'-O-methyladenosine-3'-phosphate
  modified_base 21: mod_base = OTHER; note = 2'-O-methyladenosine-3'-phosphorothioate
  modified_base 22: mod_base = OTHER; note = 2'-O-methyluridine-3'-phosphorothioate
  modified_base 23: mod_base = OTHER; note = 2'-O-methyladenosine
tttacgtgatatgtgcttgaata

SEQ ID NO: 370 - RNA, 23 nt, synthetic construct
  source 1..23: mol_type = other RNA
  modified_base 1: mod_base = OTHER; note = 2'-O-methyluridine-3'-phosphorothioate 5'-(E)-Vinylphosphonate
  modified_base 2: mod_base = OTHER; note = 2'-deoxy-2'-fluoroguanosine-3'-phosphorothioate
  modified_base 3: mod_base = OTHER; note = 2'-O-methyluridine-3'-phosphate
  modified_base 4: mod_base = OTHER; note = 2'-O-methyluridine-3'-phosphate
  modified_base 5: mod_base = OTHER; note = 2'-O-methyladenosine-3'-phosphate
  modified_base 6: mod_base = OTHER; note = 2'-deoxy-2'-fluorocytidine-3'-phosphate
  modified_base 7: mod_base = OTHER; note = 2'-O-methylguanosine-3'-phosphate
  modified_base 8: mod_base = OTHER; note = 2'-deoxy-2'-fluorouridine-3'-phosphate
  modified_base 9: mod_base = OTHER; note = 2'-deoxy-2'-fluoroguanosine-3'-phosphate
  modified_base 10: mod_base = OTHER; note = 2'-O-methyladenosine-3'-phosphate
  modified_base 11: mod_base = OTHER; note = 2'-O-methyluridine-3'-phosphate
  modified_base 12: mod_base = OTHER; note = 2'-O-methyladenosine-3'-phosphate
  modified_base 13: mod_base = OTHER; note = 2'-O-methyluridine-3'-phosphate
  modified_base 14: mod_base = OTHER; note = 2'-deoxy-2'-fluoroguanosine-3'-phosphate
  modified_base 15: mod_base = OTHER; note = 2'-O-methyluridine-3'-phosphate
  modified_base 16: mod_base = OTHER; note = 2'-deoxy-2'-fluoroguanosine-3'-phosphate
  modified_base 17: mod_base = OTHER; note = 2'-O-methylcytidine-3'-phosphate
  modified_base 18: mod_base = OTHER; note = 2'-O-methyluridine-3'-phosphate
  modified_base 19: mod_base = OTHER; note = 2'-O-methyluridine-3'-phosphate
  modified_base 20: mod_base = OTHER; note = 2'-O-methylguanosine-3'-phosphate
  modified_base 21: mod_base = OTHER; note = 2'-O-methyladenosine-3'-phosphorothioate
  modified_base 22: mod_base = OTHER; note = 2'-O-methyladenosine-3'-phosphorothioate
  modified_base 23: mod_base = OTHER; note = 2'-O-methyluridine
tgttacgtgatatgtgcttgaat

SEQ ID NO: 371 - RNA, 23 nt, synthetic construct
  source 1..23: mol_type = other RNA
  modified_base 1: mod_base = OTHER; note = 2'-O-methyluridine-3'-phosphorothioate 5'-(E)-Vinylphosphonate
  modified_base 2: mod_base = OTHER; note = 2'-deoxy-2'-fluoroadenosine-3'-phosphorothioate
  modified_base 3: mod_base = OTHER; note = 2'-O-methylcytidine-3'-phosphate
  modified_base 4: mod_base = OTHER; note = 2'-O-methyluridine-3'-phosphate
  modified_base 5: mod_base = OTHER; note = 2'-O-methylguanosine-3'-phosphate
  modified_base 6: mod_base = OTHER; note = 2'-deoxy-2'-fluorouridine-3'-phosphate
  modified_base 7: mod_base = OTHER; note = 2'-O-methyluridine-3'-phosphate
  modified_base 8: mod_base = OTHER; note = 2'-deoxy-2'-fluoroadenosine-3'-phosphate
  modified_base 9: mod_base = OTHER; note = 2'-deoxy-2'-fluorocytidine-3'-phosphate
  modified_base 10: mod_base = OTHER; note = 2'-O-methylguanosine-3'-phosphate
  modified_base 11: mod_base = OTHER; note = 2'-O-methyluridine-3'-phosphate
  modified_base 12: mod_base = OTHER; note = 2'-O-methylguanosine-3'-phosphate
  modified_base 13: mod_base = OTHER; note = 2'-O-methyladenosine-3'-phosphate
  modified_base 14: mod_base = OTHER; note = 2'-deoxy-2'-fluorouridine-3'-phosphate
  modified_base 15: mod_base = OTHER; note = 2'-O-methyladenosine-3'-phosphate
  modified_base 16: mod_base = OTHER; note = 2'-deoxy-2'-fluorouridine-3'-phosphate
  modified_base 17: mod_base = OTHER; note = 2'-O-methylguanosine-3'-phosphate
  modified_base 18: mod_base = OTHER; note = 2'-O-methyluridine-3'-phosphate
  modified_base 19: mod_base = OTHER; note = 2'-O-methylguanosine-3'-phosphate
  modified_base 20: mod_base = OTHER; note = 2'-O-methylcytidine-3'-phosphate
  modified_base 21: mod_base = OTHER; note = 2'-O-methyluridine-3'-phosphorothioate
  modified_base 22: mod_base = OTHER; note = 2'-O-methyluridine-3'-phosphorothioate
  modified_base 23: mod_base = OTHER; note = 2'-O-methylguanosine
tactgttacgtgatatgtgcttg

SEQ ID NO: 372 - RNA, 23 nt, synthetic construct
  source 1..23: mol_type = other RNA
  modified_base 1: mod_base = OTHER; note = 2'-O-methyluridine-3'-phosphorothioate 5'-(E)-Vinylphosphonate
  modified_base 2: mod_base = OTHER; note = 2'-deoxy-2'-fluoroguanosine-3'-phosphorothioate
  modified_base 3: mod_base = OTHER; note = 2'-O-methyluridine-3'-phosphate
  modified_base 4: mod_base = OTHER; note = 2'-O-methyluridine-3'-phosphate
  modified_base 5: mod_base = OTHER; note = 2'-O-methyluridine-3'-phosphate
  modified_base 6: mod_base = OTHER; note = 2'-deoxy-2'-fluoroguanosine-3'-phosphate
  modified_base 7: mod_base = OTHER; note = 2'-O-methyluridine-3'-phosphate
  modified_base 8: mod_base = OTHER; note = 2'-deoxy-2'-fluorouridine-3'-phosphate
  modified_base 9: mod_base = OTHER; note = 2'-deoxy-2'-fluorocytidine-3'-phosphate
  modified_base 10: mod_base = OTHER; note = 2'-O-methylcytidine-3'-phosphate
  modified_base 11: mod_base = OTHER; note = 2'-O-methyladenosine-3'-phosphate
  modified_base 12: mod_base = OTHER; note = 2'-O-methyluridine-3'-phosphate
  modified_base 13: mod_base = OTHER; note = 2'-O-methyladenosine-3'-phosphate
  modified_base 14: mod_base = OTHER; note = 2'-deoxy-2'-fluorouridine-3'-phosphate
  modified_base 15: mod_base = OTHER; note = 2'-O-methyluridine-3'-phosphate
  modified_base 16: mod_base = OTHER; note = 2'-deoxy-2'-fluoroadenosine-3'-phosphate
  modified_base 17: mod_base = OTHER; note = 2'-O-methyladenosine-3'-phosphate
  modified_base 18: mod_base = OTHER; note = 2'-O-methyladenosine-3'-phosphate
  modified_base 19: mod_base = OTHER; note = 2'-O-methylcytidine-3'-phosphate
  modified_base 20: mod_base = OTHER; note = 2'-O-methyluridine-3'-phosphate
  modified_base 21: mod_base = OTHER; note = 2'-O-methylguanosine-3'-phosphorothioate
  modified_base 22: mod_base = OTHER; note = 2'-O-methyluridine-3'-phosphorothioate
  modified_base 23: mod_base = OTHER; note = 2'-O-methyluridine
tgtttgttccatattaaactgtt

SEQ ID NO: 373 - RNA, 23 nt, synthetic construct
  source 1..23: mol_type = other RNA
  modified_base 1: mod_base = OTHER; note = 2'-O-methyluridine-3'-phosphorothioate 5'-(E)-Vinylphosphonate
  modified_base 2: mod_base = OTHER; note = 2'-deoxy-2'-fluoroadenosine-3'-phosphorothioate
  modified_base 3: mod_base = OTHER; note = 2'-O-methylcytidine-3'-phosphate
  modified_base 4: mod_base = OTHER; note = 2'-O-methylguanosine-3'-phosphate
  modified_base 5: mod_base = OTHER; note = 2'-O-methyladenosine-3'-phosphate
  modified_base 6: mod_base = OTHER; note = 2'-deoxy-2'-fluoroadenosine-3'-phosphate
  modified_base 7: mod_base = OTHER; note = 2'-O-methylcytidine-3'-phosphate
  modified_base 8: mod_base = OTHER; note = 2'-deoxy-2'-fluoroadenosine-3'-phosphate
  modified_base 9: mod_base = OTHER; note = 2'-deoxy-2'-fluoroadenosine-3'-phosphate
  modified_base 10: mod_base = OTHER; note = 2'-O-methyluridine-3'-phosphate
  modified_base 11: mod_base = OTHER; note = 2'-O-methylcytidine-3'-phosphate
  modified_base 12: mod_base = OTHER; note = 2'-O-methylcytidine-3'-phosphate
  modified_base 13: mod_base = OTHER; note = 2'-O-methyluridine-3'-phosphate
  modified_base 14: mod_base = OTHER; note = 2'-deoxy-2'-fluorocytidine-3'-phosphate
  modified_base 15: mod_base = OTHER; note = 2'-O-methylcytidine-3'-phosphate
  modified_base 16: mod_base = OTHER; note = 2'-deoxy-2'-fluoroadenosine-3'-phosphate
  modified_base 17: mod_base = OTHER; note = 2'-O-methylguanosine-3'-phosphate
  modified_base 18: mod_base = OTHER; note = 2'-O-methylguanosine-3'-phosphate
  modified_base 19: mod_base = OTHER; note = 2'-O-methyladenosine-3'-phosphate
  modified_base 20: mod_base = OTHER; note = 2'-O-methyluridine-3'-phosphate
  modified_base 21: mod_base = OTHER; note = 2'-O-methylguanosine-3'-phosphorothioate
  modified_base 22: mod_base = OTHER; note = 2'-O-methyluridine-3'-phosphorothioate
  modified_base 23: mod_base = OTHER; note = 2'-O-methyluridine
tacgaacaatcctccaggatgtt

SEQ ID NO: 374 - RNA, 23 nt, synthetic construct
  source 1..23: mol_type = other RNA
  modified_base 1: mod_base = OTHER; note = 2'-O-methyluridine-3'-phosphorothioate 5'-(E)-Vinylphosphonate
  modified_base 2: mod_base = OTHER; note = 2'-deoxy-2'-fluoroadenosine-3'-phosphorothioate
  modified_base 3: mod_base = OTHER; note = 2'-O-methylguanosine-3'-phosphate
  modified_base 4: mod_base = OTHER; note = 2'-O-methylcytidine-3'-phosphate
  modified_base 5: mod_base = OTHER; note = 2'-O-methyladenosine-3'-phosphate
  modified_base 6: mod_base = OTHER; note = 2'-deoxy-2'-fluorouridine-3'-phosphate
  modified_base 7: mod_base = OTHER; note = 2'-O-methyladenosine-3'-phosphate
  modified_base 8: mod_base = OTHER; note = 2'-deoxy-2'-fluoroguanosine-3'-phosphate
  modified_base 9: mod_base = OTHER; note = 2'-deoxy-2'-fluorouridine-3'-phosphate
  modified_base 10: mod_base = OTHER; note = 2'-O-methyladenosine-3'-phosphate
  modified_base 11: mod_base = OTHER; note = 2'-O-methylguanosine-3'-phosphate
  modified_base 12: mod_base = OTHER; note = 2'-O-methyluridine-3'-phosphate
  modified_base 13: mod_base = OTHER; note = 2'-O-methyladenosine-3'-phosphate
  modified_base 14: mod_base = OTHER; note = 2'-deoxy-2'-fluoroadenosine-3'-phosphate
  modified_base 15: mod_base = OTHER; note = 2'-O-methylguanosine-3'-phosphate
  modified_base 16: mod_base = OTHER; note = 2'-deoxy-2'-fluoroguanosine-3'-phosphate
  modified_base 17: mod_base = OTHER; note = 2'-O-methylguanosine-3'-phosphate
  modified_base 18: mod_base = OTHER; note = 2'-O-methyladenosine-3'-phosphate
  modified_base 19: mod_base = OTHER; note = 2'-O-methyladenosine-3'-phosphate
  modified_base 20: mod_base = OTHER; note = 2'-O-methyladenosine-3'-phosphate
  modified_base 21: mod_base = OTHER; note = 2'-O-methyluridine-3'-phosphorothioate
  modified_base 22: mod_base = OTHER; note = 2'-O-methylcytidine-3'-phosphorothioate
  modified_base 23: mod_base = OTHER; note = 2'-O-methyluridine
tagcatagtagtaagggaaatct

SEQ ID NO: 375 - RNA, 23 nt, synthetic construct
  source 1..23: mol_type = other RNA
  modified_base 1: mod_base = OTHER; note = 2'-O-methyluridine-3'-phosphorothioate 5'-(E)-Vinylphosphonate
  modified_base 2: mod_base = OTHER; note = 2'-deoxy-2'-fluorouridine-3'-phosphorothioate
  modified_base 3: mod_base = OTHER; note = 2'-O-methyladenosine-3'-phosphate
  modified_base 4: mod_base = OTHER; note = 2'-O-methylguanosine-3'-phosphate
  modified_base 5: mod_base = OTHER; note = 2'-O-methylcytidine-3'-phosphate
  modified_base 6: mod_base = OTHER; note = 2'-deoxy-2'-fluoroadenosine-3'-phosphate
  modified_base 7: mod_base = OTHER; note = 2'-O-methyluridine-3'-phosphate
  modified_base 8: mod_base = OTHER; note = 2'-deoxy-2'-fluoroadenosine-3'-phosphate
  modified_base 9: mod_base = OTHER; note = 2'-deoxy-2'-fluoroguanosine-3'-phosphate
  modified_base 10: mod_base = OTHER; note = 2'-O-methyluridine-3'-phosphate
  modified_base 11: mod_base = OTHER; note = 2'-O-methyladenosine-3'-phosphate
  modified_base 12: mod_base = OTHER; note = 2'-O-methylguanosine-3'-phosphate
  modified_base 13: mod_base = OTHER; note = 2'-O-methyluridine-3'-phosphate
  modified_base 14: mod_base = OTHER; note = 2'-deoxy-2'-fluoroadenosine-3'-phosphate
  modified_base 15: mod_base = OTHER; note = 2'-O-methyladenosine-3'-phosphate
  modified_base 16: mod_base = OTHER; note = 2'-deoxy-2'-fluoroguanosine-3'-phosphate
  modified_base 17: mod_base = OTHER; note = 2'-O-methylguanosine-3'-phosphate
  modified_base 18: mod_base = OTHER; note = 2'-O-methylguanosine-3'-phosphate
  modified_base 19: mod_base = OTHER; note = 2'-O-methyladenosine-3'-phosphate
  modified_base 20: mod_base = OTHER; note = 2'-O-methyladenosine-3'-phosphate
  modified_base 21: mod_base = OTHER; note = 2'-O-methyladenosine-3'-phosphorothioate
  modified_base 22: mod_base = OTHER; note = 2'-O-methyluridine-3'-phosphorothioate
  modified_base 23: mod_base = OTHER; note = 2'-O-methylcytidine
ttagcatagtagtaagggaaatc

SEQ ID NO: 376 - RNA, 23 nt, synthetic construct
  source 1..23: mol_type = other RNA
  modified_base 1: mod_base = OTHER; note = 2'-O-methyluridine-3'-phosphorothioate 5'-(E)-Vinylphosphonate
  modified_base 2: mod_base = OTHER; note = 2'-deoxy-2'-fluorouridine-3'-phosphorothioate
  modified_base 3: mod_base = OTHER; note = 2'-O-methyluridine-3'-phosphate
  modified_base 4: mod_base = OTHER; note = 2'-O-methyladenosine-3'-phosphate
  modified_base 5: mod_base = OTHER; note = 2'-O-methylguanosine-3'-phosphate
  modified_base 6: mod_base = OTHER; note = 2'-deoxy-2'-fluorocytidine-3'-phosphate
  modified_base 7: mod_base = OTHER; note = 2'-O-methyladenosine-3'-phosphate
  modified_base 8: mod_base = OTHER; note = 2'-deoxy-2'-fluorouridine-3'-phosphate
  modified_base 9: mod_base = OTHER; note = 2'-deoxy-2'-fluoroadenosine-3'-phosphate
  modified_base 10: mod_base = OTHER; note = 2'-O-methylguanosine-3'-phosphate
  modified_base 11: mod_base = OTHER; note = 2'-O-methyluridine-3'-phosphate
  modified_base 12: mod_base = OTHER; note = 2'-O-methyladenosine-3'-phosphate
  modified_base 13: mod_base = OTHER; note = 2'-O-methylguanosine-3'-phosphate
  modified_base 14: mod_base = OTHER; note = 2'-deoxy-2'-fluorouridine-3'-phosphate
  modified_base 15: mod_base = OTHER; note = 2'-O-methyladenosine-3'-phosphate
  modified_base 16: mod_base = OTHER; note = 2'-deoxy-2'-fluoroadenosine-3'-phosphate
  modified_base 17: mod_base = OTHER; note = 2'-O-methylguanosine-3'-phosphate
  modified_base 18: mod_base = OTHER; note = 2'-O-methylguanosine-3'-phosphate
  modified_base 19: mod_base = OTHER; note = 2'-O-methylguanosine-3'-phosphate
  modified_base 20: mod_base = OTHER; note = 2'-O-methyladenosine-3'-phosphate
  modified_base 21: mod_base = OTHER; note = 2'-O-methyladenosine-3'-phosphorothioate
  modified_base 22: mod_base = OTHER; note = 2'-O-methyladenosine-3'-phosphorothioate
  modified_base 23: mod_base = OTHER; note = 2'-O-methyluridine
tttagcatagtagtaagggaaat

SEQ ID NO: 377 - RNA, 23 nt, synthetic construct
  source 1..23: mol_type = other RNA
  modified_base 1: mod_base = OTHER; note = 2'-O-methyluridine-3'-phosphorothioate 5'-(E)-Vinylphosphonate
  modified_base 2: mod_base = OTHER; note = 2'-deoxy-2'-fluoroadenosine-3'-phosphorothioate
  modified_base 3: mod_base = OTHER; note = 2'-O-methyluridine-3'-phosphate
  modified_base 4: mod_base = OTHER; note = 2'-O-methyluridine-3'-phosphate
  modified_base 5: mod_base = OTHER; note = 2'-O-methyladenosine-3'-phosphate
  modified_base 6: mod_base = OTHER; note = 2'-deoxy-2'-fluoroguanosine-3'-phosphate
  modified_base 7: mod_base = OTHER; note = 2'-O-methylcytidine-3'-phosphate
  modified_base 8: mod_base = OTHER; note = 2'-deoxy-2'-fluoroadenosine-3'-phosphate
  modified_base 9: mod_base = OTHER; note = 2'-deoxy-2'-fluorouridine-3'-phosphate
  modified_base 10: mod_base = OTHER; note = 2'-O-methyladenosine-3'-phosphate
  modified_base 11: mod_base = OTHER; note = 2'-O-methylguanosine-3'-phosphate
  modified_base 12: mod_base = OTHER; note = 2'-O-methyluridine-3'-phosphate
  modified_base 13: mod_base = OTHER; note = 2'-O-methyladenosine-3'-phosphate
  modified_base 14: mod_base = OTHER; note = 2'-deoxy-2'-fluoroguanosine-3'-phosphate
  modified_base 15: mod_base = OTHER; note = 2'-O-methyluridine-3'-phosphate
  modified_base 16: mod_base = OTHER; note = 2'-deoxy-2'-fluoroadenosine-3'-phosphate
  modified_base 17: mod_base = OTHER; note = 2'-O-methyladenosine-3'-phosphate
  modified_base 18: mod_base = OTHER; note = 2'-O-methylguanosine-3'-phosphate
  modified_base 19: mod_base = OTHER; note = 2'-O-methylguanosine-3'-phosphate
  modified_base 20: mod_base = OTHER; note = 2'-O-methylguanosine-3'-phosphate
  modified_base 21: mod_base = OTHER; note = 2'-O-methyladenosine-3'-phosphorothioate
  modified_base 22: mod_base = OTHER; note = 2'-O-methyladenosine-3'-phosphorothioate
  modified_base 23: mod_base = OTHER; note = 2'-O-methyladenosine
tattagcatagtagtaagggaaa

SEQ ID NO: 378 - RNA, 23 nt, synthetic construct
  source 1..23: mol_type = other RNA
  modified_base 1: mod_base = OTHER; note = 2'-O-methyluridine-3'-phosphorothioate 5'-(E)-Vinylphosphonate
  modified_base 2: mod_base = OTHER; note = 2'-deoxy-2'-fluoroadenosine-3'-phosphorothioate
  modified_base 3: mod_base = OTHER; note = 2'-O-methyladenosine-3'-phosphate
  modified_base 4: mod_base = OTHER; note = 2'-O-methyluridine-3'-phosphate
  modified_base 5: mod_base = OTHER; note = 2'-O-methyluridine-3'-phosphate
  modified_base 6: mod_base = OTHER; note = 2'-deoxy-2'-fluoroadenosine-3'-phosphate
  modified_base 7: mod_base = OTHER; note = 2'-O-methylguanosine-3'-phosphate
  modified_base 8: mod_base = OTHER; note = 2'-deoxy-2'-fluorocytidine-3'-phosphate
  modified_base 9: mod_base = OTHER; note = 2'-deoxy-2'-fluoroadenosine-3'-phosphate
  modified_base 10: mod_base = OTHER; note = 2'-O-methyluridine-3'-phosphate
  modified_base 11: mod_base = OTHER; note = 2'-O-methyladenosine-3'-phosphate
  modified_base 12: mod_base = OTHER; note = 2'-O-methylguanosine-3'-phosphate
  modified_base 13: mod_base = OTHER; note = 2'-O-methyluridine-3'-phosphate
  modified_base 14: mod_base = OTHER; note = 2'-deoxy-2'-fluoroadenosine-3'-phosphate
  modified_base 15: mod_base = OTHER; note = 2'-O-methylguanosine-3'-phosphate
  modified_base 16: mod_base = OTHER; note = 2'-deoxy-2'-fluorouridine-3'-phosphate
  modified_base 17: mod_base = OTHER; note = 2'-O-methyladenosine-3'-phosphate
  modified_base 18: mod_base = OTHER; note = 2'-O-methyladenosine-3'-phosphate
  modified_base 19: mod_base = OTHER; note = 2'-O-methylguanosine-3'-phosphate
  modified_base 20: mod_base = OTHER; note = 2'-O-methylguanosine-3'-phosphate
  modified_base 21: mod_base = OTHER; note = 2'-O-methylguanosine-3'-phosphorothioate
  modified_base 22: mod_base = OTHER; note = 2'-O-methyladenosine-3'-phosphorothioate
  modified_base 23: mod_base = OTHER; note = 2'-O-methyladenosine
taattagcatagtagtaagggaa

SEQ ID NO: 379 - RNA, 23 nt, synthetic construct
  source 1..23: mol_type = other RNA
  modified_base 1: mod_base = OTHER; note = 2'-O-methyluridine-3'-phosphorothioate 5'-(E)-Vinylphosphonate
  modified_base 2: mod_base = OTHER; note = 2'-deoxy-2'-fluorocytidine-3'-phosphorothioate
  modified_base 3: mod_base = OTHER; note = 2'-O-methylcytidine-3'-phosphate
  modified_base 4: mod_base = OTHER; note = 2'-O-methyluridine-3'-phosphate
  modified_base 5: mod_base = OTHER; note = 2'-O-methyladenosine-3'-phosphate
  modified_base 6: mod_base = OTHER; note = 2'-deoxy-2'-fluoroadenosine-3'-phosphate
  modified_base 7: mod_base = OTHER; note = 2'-O-methyladenosine-3'-phosphate
  modified_base 8: mod_base = OTHER; note = 2'-deoxy-2'-fluorouridine-3'-phosphate
  modified_base 9: mod_base = OTHER; note = 2'-deoxy-2'-fluorouridine-3'-phosphate
  modified_base 10: mod_base = OTHER; note = 2'-O-methyladenosine-3'-phosphate
  modified_base 11: mod_base = OTHER; note = 2'-O-methylguanosine-3'-phosphate
  modified_base 12: mod_base = OTHER; note = 2'-O-methylcytidine-3'-phosphate
  modified_base 13: mod_base = OTHER; note = 2'-O-methyladenosine-3'-phosphate
  modified_base 14: mod_base = OTHER; note = 2'-deoxy-2'-fluorouridine-3'-phosphate
  modified_base 15: mod_base = OTHER; note = 2'-O-methyladenosine-3'-phosphate
  modified_base 16: mod_base = OTHER; note = 2'-deoxy-2'-fluoroguanosine-3'-phosphate
  modified_base 17: mod_base = OTHER; note = 2'-O-methyluridine-3'-phosphate
  modified_base 18: mod_base = OTHER; note = 2'-O-methyladenosine-3'-phosphate
  modified_base 19: mod_base = OTHER; note = 2'-O-methylguanosine-3'-phosphate
  modified_base 20: mod_base = OTHER; note = 2'-O-methyluridine-3'-phosphate
  modified_base 21: mod_base = OTHER; note = 2'-O-methyladenosine-3'-phosphorothioate
  modified_base 22: mod_base = OTHER; note = 2'-O-methyladenosine-3'-phosphorothioate
  modified_base 23: mod_base = OTHER; note = 2'-O-methylguanosine
tcctaaattagcatagtagtaag

SEQ ID NO: 380 - RNA, 23 nt, synthetic construct
  source 1..23: mol_type = other RNA
  modified_base 1: mod_base = OTHER; note = 2'-O-methyluridine-3'-phosphorothioate 5'-(E)-Vinylphosphonate
  modified_base 2: mod_base = OTHER; note = 2'-deoxy-2'-fluorouridine-3'-phosphorothioate
  modified_base 3: mod_base = OTHER; note = 2'-O-methyluridine-3'-phosphate
  modified_base 4: mod_base = OTHER; note = 2'-O-methylguanosine-3'-phosphate
  modified_base 5: mod_base = OTHER; note = 2'-O-methyluridine-3'-phosphate
  modified_base 6: mod_base = OTHER; note = 2'-deoxy-2'-fluorocytidine-3'-phosphate
  modified_base 7: mod_base = OTHER; note = 2'-O-methyladenosine-3'-phosphate
  modified_base 8: mod_base = OTHER; note = 2'-deoxy-2'-fluorocytidine-3'-phosphate
  modified_base 9: mod_base = OTHER; note = 2'-deoxy-2'-fluoroadenosine-3'-phosphate
  modified_base 10: mod_base = OTHER; note = 2'-O-methyladenosine-3'-phosphate
  modified_base 11: mod_base = OTHER; note = 2'-O-methyluridine-3'-phosphate
  modified_base 12: mod_base = OTHER; note = 2'-O-methyluridine-3'-phosphate
  modified_base 13: mod_base = OTHER; note = 2'-O-methylcytidine-3'-phosphate
  modified_base 14: mod_base = OTHER; note = 2'-deoxy-2'-fluorocytidine-3'-phosphate
  modified_base 15: mod_base = OTHER; note = 2'-O-methyladenosine-3'-phosphate
  modified_base 16: mod_base = OTHER; note = 2'-deoxy-2'-fluorocytidine-3'-phosphate
  modified_base 17: mod_base = OTHER; note = 2'-O-methyladenosine-3'-phosphate
  modified_base 18: mod_base = OTHER; note = 2'-O-methylguanosine-3'-phosphate
  modified_base 19: mod_base = OTHER; note = 2'-O-methyladenosine-3'-phosphate
  modified_base 20: mod_base = OTHER; note = 2'-O-methyladenosine-3'-phosphate
  modified_base 21: mod_base = OTHER; note = 2'-O-methylcytidine-3'-phosphorothioate
  modified_base 22: mod_base = OTHER; note = 2'-O-methyluridine-3'-phosphorothioate
  modified_base 23: mod_base = OTHER; note = 2'-O-methyladenosine
tttgtcacaattccacagaacta

SEQ ID NO: 381 - RNA, 23 nt, synthetic construct
  source 1..23: mol_type = other RNA
  modified_base 1: mod_base = OTHER; note = 2'-O-methyluridine-3'-phosphorothioate 5'-(E)-Vinylphosphonate
  modified_base 2: mod_base = OTHER; note = 2'-deoxy-2'-fluoroadenosine-3'-phosphorothioate
  modified_base 3: mod_base = OTHER; note = 2'-O-methyluridine-3'-phosphate
  modified_base 4: mod_base = OTHER; note = 2'-O-methylcytidine-3'-phosphate
  modified_base 5: mod_base = OTHER; note = 2'-O-methylcytidine-3'-phosphate
  modified_base 6: mod_base = OTHER; note = 2'-deoxy-2'-fluoroadenosine-3'-phosphate
  modified_base 7: mod_base = OTHER; note = 2'-O-methylcytidine-3'-phosphate
  modified_base 8: mod_base = OTHER; note = 2'-deoxy-2'-fluorouridine-3'-phosphate
  modified_base 9: mod_base = OTHER; note = 2'-deoxy-2'-fluorouridine-3'-phosphate
  modified_base 10: mod_base = OTHER; note = 2'-O-methylcytidine-3'-phosphate
  modified_base 11: mod_base = OTHER; note = 2'-O-methylcytidine-3'-phosphate
  modified_base 12: mod_base = OTHER; note = 2'-O-methylguanosine-3'-phosphate
  modified_base 13: mod_base = OTHER; note = 2'-O-methyluridine-3'-phosphate
  modified_base 14: mod_base = OTHER; note = 2'-deoxy-2'-fluoroadenosine-3'-phosphate
  modified_base 15: mod_base = OTHER; note = 2'-O-methylguanosine-3'-phosphate
  modified_base 16: mod_base = OTHER; note = 2'-deoxy-2'-fluorouridine-3'-phosphate
  modified_base 17: mod_base = OTHER; note = 2'-O-methyluridine-3'-phosphate
  modified_base 18: mod_base = OTHER; note = 2'-O-methylguanosine-3'-phosphate
  modified_base 19: mod_base = OTHER; note = 2'-O-methyladenosine-3'-phosphate
  modified_base 20: mod_base = OTHER; note = 2'-O-methyladenosine-3'-phosphate
  modified_base 21: mod_base = OTHER; note = 2'-O-methyladenosine-3'-phosphorothioate
  modified_base 22: mod_base = OTHER; note = 2'-O-methylguanosine-3'-phosphorothioate
  modified_base 23: mod_base = OTHER; note = 2'-O-methylcytidine
tatccacttccgtagttgaaagc

SEQ ID NO: 382 - RNA, 23 nt, synthetic construct
  source 1..23: mol_type = other RNA
  modified_base 1: mod_base = OTHER; note = 2'-O-methyluridine-3'-phosphorothioate 5'-(E)-Vinylphosphonate
  modified_base 2: mod_base = OTHER; note = 2'-deoxy-2'-fluorouridine-3'-phosphorothioate
  modified_base 3: mod_base = OTHER; note = 2'-O-methyluridine-3'-phosphate
  modified_base 4: mod_base = OTHER; note = 2'-O-methyluridine-3'-phosphate
  modified_base 5: mod_base = OTHER; note = 2'-O-methylguanosine-3'-phosphate
  modified_base 6: mod_base = OTHER; note = 2'-deoxy-2'-fluoroadenosine-3'-phosphate
  modified_base 7: mod_base = OTHER; note = 2'-O-methylguanosine-3'-phosphate
  modified_base 8: mod_base = OTHER; note = 2'-deoxy-2'-fluorouridine-3'-phosphate
  modified_base 9: mod_base = OTHER; note = 2'-deoxy-2'-fluorouridine-3'-phosphate
  modified_base 10: mod_base = OTHER; note = 2'-O-methyladenosine-3'-phosphate
  modified_base 11: mod_base = OTHER; note = 2'-O-methyluridine-3'-phosphate
  modified_base 12: mod_base = OTHER; note = 2'-O-methylcytidine-3'-phosphate
  modified_base 13: mod_base = OTHER; note = 2'-O-methylcytidine-3'-phosphate
  modified_base 14: mod_base = OTHER; note = 2'-deoxy-2'-fluorocytidine-3'-phosphate
  modified_base 15: mod_base = OTHER; note = 2'-O-methyladenosine-3'-phosphate
  modified_base 16: mod_base = OTHER; note = 2'-deoxy-2'-fluoroguanosine-3'-phosphate
  modified_base 17: mod_base = OTHER; note = 2'-O-methyladenosine-3'-phosphate
  modified_base 18: mod_base = OTHER; note = 2'-O-methyladenosine-3'-phosphate
  modified_base 19: mod_base = OTHER; note = 2'-O-methyladenosine-3'-phosphate
  modified_base 20: mod_base = OTHER; note = 2'-O-methyluridine-3'-phosphate
  modified_base 21: mod_base = OTHER; note = 2'-O-methylguanosine-3'-phosphorothioate
  modified_base 22: mod_base = OTHER; note = 2'-O-methyladenosine-3'-phosphorothioate
  modified_base 23: mod_base = OTHER; note = 2'-O-methylcytidine
ttttgagttatcccagaaatgac

SEQ ID NO: 383 - RNA, 23 nt, synthetic construct
  source 1..23: mol_type = other RNA
  modified_base 1: mod_base = OTHER; note = 2'-O-methyluridine-3'-phosphorothioate 5'-(E)-Vinylphosphonate
  modified_base 2: mod_base = OTHER; note = 2'-deoxy-2'-fluorocytidine-3'-phosphorothioate
  modified_base 3: mod_base = OTHER; note = 2'-O-methylcytidine-3'-phosphate
  modified_base 4: mod_base = OTHER; note = 2'-O-methyluridine-3'-phosphate
  modified_base 5: mod_base = OTHER; note = 2'-O-methyluridine-3'-phosphate
  modified_base 6: mod_base = OTHER; note = 2'-deoxy-2'-fluorouridine-3'-phosphate
  modified_base 7: mod_base = OTHER; note = 2'-O-methylguanosine-3'-phosphate
  modified_base 8: mod_base = OTHER; note = 2'-deoxy-2'-fluoroadenosine-3'-phosphate
  modified_base 9: mod_base = OTHER; note = 2'-deoxy-2'-fluoroguanosine-3'-phosphate
  modified_base 10: mod_base = OTHER; note = 2'-O-methyluridine-3'-phosphate
  modified_base 11: mod_base = OTHER; note = 2'-O-methyluridine-3'-phosphate
  modified_base 12: mod_base = OTHER; note = 2'-O-methyladenosine-3'-phosphate
  modified_base 13: mod_base = OTHER; note = 2'-O-methyluridine-3'-phosphate
  modified_base 14: mod_base = OTHER; note = 2'-deoxy-2'-fluorocytidine-3'-phosphate
  modified_base 15: mod_base = OTHER; note = 2'-O-methylcytidine-3'-phosphate
  modified_base 16: mod_base = OTHER; note = 2'-deoxy-2'-fluorocytidine-3'-phosphate
  modified_base 17: mod_base = OTHER; note = 2'-O-methyladenosine-3'-phosphate
  modified_base 18: mod_base = OTHER; note = 2'-O-methylguanosine-3'-phosphate
  modified_base 19: mod_base = OTHER; note = 2'-O-methyladenosine-3'-phosphate
  modified_base 20: mod_base = OTHER; note = 2'-O-methyladenosine-3'-phosphate
  modified_base 21: mod_base = OTHER; note = 2'-O-methyladenosine-3'-phosphorothioate
  modified_base 22: mod_base = OTHER; note = 2'-O-methyluridine-3'-phosphorothioate
  modified_base 23: mod_base = OTHER; note = 2'-O-methylguanosine
tcctttgagttatcccagaaatg

SEQ ID NO: 384 - RNA, 23 nt, synthetic construct
  source 1..23: mol_type = other RNA
  modified_base 1: mod_base = OTHER; note = 2'-O-methyluridine-3'-phosphorothioate 5'-(E)-Vinylphosphonate
  modified_base 2: mod_base = OTHER; note = 2'-deoxy-2'-fluoroadenosine-3'-phosphorothioate
  modified_base 3: mod_base = OTHER; note = 2'-O-methyluridine-3'-phosphate
  modified_base 4: mod_base = OTHER; note = 2'-O-methyladenosine-3'-phosphate
  modified_base 5: mod_base = OTHER; note = 2'-O-methyluridine-3'-phosphate
  modified_base 6: mod_base = OTHER; note = 2'-deoxy-2'-fluorouridine-3'-phosphate
  modified_base 7: mod_base = OTHER; note = 2'-O-methyluridine-3'-phosphate
  modified_base 8: mod_base = OTHER; note = 2'-deoxy-2'-fluoroguanosine-3'-phosphate
  modified_base 9: mod_base = OTHER; note = 2'-deoxy-2'-fluorouridine-3'-phosphate
  modified_base 10: mod_base = OTHER; note = 2'-O-methylguanosine-3'-phosphate
  modified_base 11: mod_base = OTHER; note = 2'-O-methylguanosine-3'-phosphate
  modified_base 12: mod_base = OTHER; note = 2'-O-methyluridine-3'-phosphate
  modified_base 13: mod_base = OTHER; note = 2'-O-methyladenosine-3'-phosphate
  modified_base 14: mod_base = OTHER; note = 2'-deoxy-2'-fluoroguanosine-3'-phosphate
  modified_base 15: mod_base = OTHER; note = 2'-O-methyladenosine-3'-phosphate
  modified_base 16: mod_base = OTHER; note = 2'-deoxy-2'-fluorouridine-3'-phosphate
  modified_base 17: mod_base = OTHER; note = 2'-O-methyladenosine-3'-phosphate
  modified_base 18: mod_base = OTHER; note = 2'-O-methylguanosine-3'-phosphate
  modified_base 19: mod_base = OTHER; note = 2'-O-methylcytidine-3'-phosphate
  modified_base 20: mod_base = OTHER; note = 2'-O-methyladenosine-3'-phosphate
  modified_base 21: mod_base = OTHER; note = 2'-O-methylguanosine-3'-phosphorothioate
  modified_base 22: mod_base = OTHER; note = 2'-O-methylcytidine-3'-phosphorothioate
  modified_base 23: mod_base = OTHER; note = 2'-O-methyluridine
tatatttgtggtagatagcagct

SEQ ID NO: 385 - RNA, 23 nt, synthetic construct
  source 1..23: mol_type = other RNA
  modified_base 1: mod_base = OTHER; note = 2'-O-methyluridine-3'-phosphorothioate 5'-(E)-Vinylphosphonate
  modified_base 2: mod_base = OTHER; note = 2'-deoxy-2'-fluoroadenosine-3'-phosphorothioate
  modified_base 3: mod_base = OTHER; note = 2'-O-methyladenosine-3'-phosphate
  modified_base 4: mod_base = OTHER; note = 2'-O-methyluridine-3'-phosphate
  modified_base 5: mod_base = OTHER; note = 2'-O-methyladenosine-3'-phosphate
  modified_base 6: mod_base = OTHER; note = 2'-deoxy-2'-fluorouridine-3'-phosphate
  modified_base 7: mod_base = OTHER; note = 2'-O-methyluridine-3'-phosphate
  modified_base 8: mod_base = OTHER; note = 2'-deoxy-2'-fluorouridine-3'-phosphate
  modified_base 9: mod_base = OTHER; note = 2'-deoxy-2'-fluoroguanosine-3'-phosphate
  modified_base 10: mod_base = OTHER; note = 2'-O-methyluridine-3'-phosphate
  modified_base 11: mod_base = OTHER; note = 2'-O-methylguanosine-3'-phosphate
  modified_base 12: mod_base = OTHER; note = 2'-O-methylguanosine-3'-phosphate
  modified_base 13: mod_base = OTHER; note = 2'-O-methyluridine-3'-phosphate
  modified_base 14: mod_base = OTHER; note = 2'-deoxy-2'-fluoroadenosine-3'-phosphate
  modified_base 15: mod_base = OTHER; note = 2'-O-methylguanosine-3'-phosphate
  modified_base 16: mod_base = OTHER; note = 2'-deoxy-2'-fluoroadenosine-3'-phosphate
  modified_base 17: mod_base = OTHER; note = 2'-O-methyluridine-3'-phosphate
  modified_base 18: mod_base = OTHER; note = 2'-O-methyladenosine-3'-phosphate
  modified_base 19: mod_base = OTHER; note = 2'-O-methylguanosine-3'-phosphate
  modified_base 20: mod_base = OTHER; note = 2'-O-methylcytidine-3'-phosphate
  modified_base 21: mod_base = OTHER; note = 2'-O-methyladenosine-3'-phosphorothioate
  modified_base 22: mod_base = OTHER; note = 2'-O-methylguanosine-3'-phosphorothioate
  modified_base 23: mod_base = OTHER; note = 2'-O-methylcytidine
taatatttgtggtagatagcagc

SEQ ID NO: 386 - RNA, 23 nt, synthetic construct
  source 1..23: mol_type = other RNA
  modified_base 1: mod_base = OTHER; note = 2'-O-methyluridine-3'-phosphorothioate 5'-(E)-Vinylphosphonate
  modified_base 2: mod_base = OTHER; note = 2'-deoxy-2'-fluoroadenosine-3'-phosphorothioate
  modified_base 3: mod_base = OTHER; note = 2'-O-methylguanosine-3'-phosphate
  modified_base 4: mod_base = OTHER; note = 2'-O-methyluridine-3'-phosphate
  modified_base 5: mod_base = OTHER; note = 2'-O-methylguanosine-3'-phosphate
  modified_base 6: mod_base = OTHER; note = 2'-deoxy-2'-fluoroadenosine-3'-phosphate
  modified_base 7: mod_base = OTHER; note = 2'-O-methyluridine-3'-phosphate
  modified_base 8: mod_base = OTHER; note = 2'-deoxy-2'-fluoroadenosine-3'-phosphate
  modified_base 9: mod_base = OTHER; note = 2'-deoxy-2'-fluoroadenosine-3'-phosphate
  modified_base 10: mod_base = OTHER; note = 2'-O-methyluridine-3'-phosphate
  modified_base 11: mod_base = OTHER; note = 2'-O-methyladenosine-3'-phosphate
  modified_base 12: mod_base = OTHER; note = 2'-O-methyluridine-3'-phosphate
  modified_base 13: mod_base = OTHER; note = 2'-O-methyluridine-3'-phosphate
  modified_base 14: mod_base = OTHER; note = 2'-deoxy-2'-fluorouridine-3'-phosphate
  modified_base 15: mod_base = OTHER; note = 2'-O-methylguanosine-3'-phosphate
  modified_base 16: mod_base = OTHER; note = 2'-deoxy-2'-fluorouridine-3'-phosphate
  modified_base 17: mod_base = OTHER; note = 2'-O-methylguanosine-3'-phosphate
  modified_base 18: mod_base = OTHER; note = 2'-O-methylguanosine-3'-phosphate
  modified_base 19: mod_base = OTHER; note = 2'-O-methyluridine-3'-phosphate
  modified_base 20: mod_base = OTHER; note = 2'-O-methyladenosine-3'-phosphate
  modified_base 21: mod_base = OTHER; note = 2'-O-methylguanosine-3'-phosphorothioate
  modified_base 22: mod_base = OTHER; note = 2'-O-methyladenosine-3'-phosphorothioate
  modified_base 23: mod_base = OTHER; note = 2'-O-methyluridine
tagtgataatatttgtggtagat

SEQ ID NO: 387 - RNA, 23 nt, synthetic construct
  source 1..23: mol_type = other RNA
  modified_base 1: mod_base = OTHER; note = 2'-O-methyluridine-3'-phosphorothioate 5'-(E)-Vinylphosphonate
  modified_base 2: mod_base = OTHER; note = 2'-deoxy-2'-fluorouridine-3'-phosphorothioate
  modified_base 3: mod_base = OTHER; note = 2'-O-methyladenosine-3'-phosphate
  modified_base 4: mod_base = OTHER; note = 2'-O-methylguanosine-3'-phosphate
  modified_base 5: mod_base = OTHER; note = 2'-O-methyluridine-3'-phosphate
  modified_base 6: mod_base = OTHER; note = 2'-deoxy-2'-fluoroguanosine-3'-phosphate
  modified_base 7: mod_base = OTHER; note = 2'-O-methyladenosine-3'-phosphate
  modified_base 8: mod_base = OTHER; note = 2'-deoxy-2'-fluorouridine-3'-phosphate
  modified_base 9: mod_base = OTHER; note = 2'-deoxy-2'-fluoroadenosine-3'-phosphate
  modified_base 10: mod_base = OTHER; note = 2'-O-methyladenosine-3'-phosphate
  modified_base 11: mod_base = OTHER; note = 2'-O-methyluridine-3'-phosphate
  modified_base 12: mod_base = OTHER; note = 2'-O-methyladenosine-3'-phosphate
  modified_base 13: mod_base = OTHER; note = 2'-O-methyluridine-3'-phosphate
  modified_base 14: mod_base = OTHER; note = 2'-deoxy-2'-fluorouridine-3'-phosphate
  modified_base 15: mod_base = OTHER; note = 2'-O-methyluridine-3'-phosphate
  modified_base 16: mod_base = OTHER; note = 2'-deoxy-2'-fluoroguanosine-3'-phosphate
  modified_base 17: mod_base = OTHER; note = 2'-O-methyluridine-3'-phosphate
  modified_base 18: mod_base = OTHER; note = 2'-O-methylguanosine-3'-phosphate
  modified_base 19: mod_base = OTHER; note = 2'-O-methylguanosine-3'-phosphate
  modified_base 20: mod_base = OTHER; note = 2'-O-methyluridine-3'-phosphate
  modified_base 21: mod_base = OTHER; note = 2'-O-methyladenosine-3'-phosphorothioate
  modified_base 22: mod_base = OTHER; note = 2'-O-methylguanosine-3'-phosphorothioate
  modified_base 23: mod_base = OTHER; note = 2'-O-methyladenosine
ttagtgataatatttgtggtaga

SEQ ID NO: 388 - RNA, 23 nt, synthetic construct
  source 1..23: mol_type = other RNA
  modified_base 1: mod_base = OTHER; note = 2'-O-methyluridine-3'-phosphorothioate 5'-(E)-Vinylphosphonate
  modified_base 2: mod_base = OTHER; note = 2'-deoxy-2'-fluoroguanosine-3'-phosphorothioate
  modified_base 3: mod_base = OTHER; note = 2'-O-methyluridine-3'-phosphate
  modified_base 4: mod_base = OTHER; note = 2'-O-methyladenosine-3'-phosphate
  modified_base 5: mod_base = OTHER; note = 2'-O-methylguanosine-3'-phosphate
  modified_base 6: mod_base = OTHER; note = 2'-deoxy-2'-fluorouridine-3'-phosphate
  modified_base 7: mod_base = OTHER; note = 2'-O-methylguanosine-3'-phosphate
  modified_base 8: mod_base = OTHER; note = 2'-deoxy-2'-fluoroadenosine-3'-phosphate
  modified_base 9: mod_base = OTHER; note = 2'-deoxy-2'-fluorouridine-3'-phosphate
  modified_base 10: mod_base = OTHER; note = 2'-O-methyladenosine-3'-phosphate
  modified_base 11: mod_base = OTHER; note = 2'-O-methyladenosine-3'-phosphate
  modified_base 12: mod_base = OTHER; note = 2'-O-methyluridine-3'-phosphate
  modified_base 13: mod_base = OTHER; note = 2'-O-methyladenosine-3'-phosphate
  modified_base 14: mod_base = OTHER; note = 2'-deoxy-2'-fluorouridine-3'-phosphate
  modified_base 15: mod_base = OTHER; note = 2'-O-methyluridine-3'-phosphate
  modified_base 16: mod_base = OTHER; note = 2'-deoxy-2'-fluorouridine-3'-phosphate
  modified_base 17: mod_base = OTHER; note = 2'-O-methylguanosine-3'-phosphate
  modified_base 18: mod_base = OTHER; note = 2'-O-methyluridine-3'-phosphate
  modified_base 19: mod_base = OTHER; note = 2'-O-methylguanosine-3'-phosphate
  modified_base 20: mod_base = OTHER; note = 2'-O-methylguanosine-3'-phosphate
  modified_base 21: mod_base = OTHER; note = 2'-O-methyluridine-3'-phosphorothioate
  modified_base 22: mod_base = OTHER; note = 2'-O-methyladenosine-3'-phosphorothioate
  modified_base 23: mod_base = OTHER; note = 2'-O-methylguanosine
tgtagtgataatatttgtggtag

SEQ ID NO: 389 - RNA, 23 nt, synthetic construct
  source 1..23: mol_type = other RNA
  modified_base 1: mod_base = OTHER; note = 2'-O-methyluridine-3'-phosphorothioate 5'-(E)-Vinylphosphonate
  modified_base 2: mod_base = OTHER; note = 2'-deoxy-2'-fluoroadenosine-3'-phosphorothioate
  modified_base 3: mod_base = OTHER; note = 2'-O-methylguanosine-3'-phosphate
  modified_base 4: mod_base = OTHER; note = 2'-O-methylguanosine-3'-phosphate
  modified_base 5: mod_base = OTHER; note = 2'-O-methyluridine-3'-phosphate
  modified_base 6: mod_base = OTHER; note = 2'-deoxy-2'-fluoroadenosine-3'-phosphate
  modified_base 7: mod_base = OTHER; note = 2'-O-methylguanosine-3'-phosphate
  modified_base 8: mod_base = OTHER; note = 2'-deoxy-2'-fluorouridine-3'-phosphate
  modified_base 9: mod_base = OTHER; note = 2'-deoxy-2'-fluoroguanosine-3'-phosphate
  modified_base 10: mod_base = OTHER; note = 2'-O-methyladenosine-3'-phosphate
  modified_base 11: mod_base = OTHER; note = 2'-O-methyluridine-3'-phosphate
  modified_base 12: mod_base = OTHER; note = 2'-O-methyladenosine-3'-phosphate
  modified_base 13: mod_base = OTHER; note = 2'-O-methyladenosine-3'-phosphate
  modified_base 14: mod_base = OTHER; note = 2'-deoxy-2'-fluorouridine-3'-phosphate
  modified_base 15: mod_base = OTHER; note = 2'-O-methyladenosine-3'-phosphate
  modified_base 16: mod_base = OTHER; note = 2'-deoxy-2'-fluorouridine-3'-phosphate
  modified_base 17: mod_base = OTHER; note = 2'-O-methyluridine-3'-phosphate
  modified_base 18: mod_base = OTHER; note = 2'-O-methyluridine-3'-phosphate
  modified_base 19: mod_base = OTHER; note = 2'-O-methylguanosine-3'-phosphate
  modified_base 20: mod_base = OTHER; note = 2'-O-methyluridine-3'-phosphate
  modified_base 21: mod_base = OTHER; note = 2'-O-methylguanosine-3'-phosphorothioate
  modified_base 22: mod_base = OTHER; note = 2'-O-methylguanosine-3'-phosphorothioate
  modified_base 23: mod_base = OTHER; note = 2'-O-methyluridine
taggtagtgataatatttgtggt

SEQ ID NO: 390 - RNA, 23 nt, synthetic construct
  source 1..23: mol_type = other RNA
  modified_base 1: mod_base = OTHER; note = 2'-O-methyluridine-3'-phosphorothioate 5'-(E)-Vinylphosphonate
  modified_base 2: mod_base = OTHER; note = 2'-deoxy-2'-fluorouridine-3'-phosphorothioate
  modified_base 3: mod_base = OTHER; note = 2'-O-methylguanosine-3'-phosphate
  modified_base 4: mod_base = OTHER; note = 2'-O-methylguanosine-3'-phosphate
  modified_base 5: mod_base = OTHER; note = 2'-O-methylguanosine-3'-phosphate
  modified_base 6: mod_base = OTHER; note = 2'-deoxy-2'-fluoroadenosine-3'-phosphate
  modified_base 7: mod_base = OTHER; note = 2'-O-methyladenosine-3'-phosphate
  modified_base 8: mod_base = OTHER; note = 2'-deoxy-2'-fluorouridine-3'-phosphate
  modified_base 9: mod_base = OTHER; note = 2'-deoxy-2'-fluoroadenosine-3'-phosphate
  modified_base 10: mod_base = OTHER; note = 2'-O-methylcytidine-3'-phosphate
  modified_base 11: mod_base = OTHER; note = 2'-O-methyladenosine-3'-phosphate
  modified_base 12: mod_base = OTHER; note = 2'-O-methylguanosine-3'-phosphate
  modified_base 13: mod_base = OTHER; note = 2'-O-methylguanosine-3'-phosphate
  modified_base 14: mod_base = OTHER; note = 2'-deoxy-2'-fluorouridine-3'-phosphate
  modified_base 15: mod_base = OTHER; note = 2'-O-methyladenosine-3'-phosphate
  modified_base 16: mod_base = OTHER; note = 2'-deoxy-2'-fluoroguanosine-3'-phosphate
  modified_base 17: mod_base = OTHER; note = 2'-O-methyluridine-3'-phosphate
  modified_base 18: mod_base = OTHER; note = 2'-O-methylguanosine-3'-phosphate
  modified_base 19: mod_base = OTHER; note = 2'-O-methyladenosine-3'-phosphate
  modified_base 20: mod_base = OTHER; note = 2'-O-methyluridine-3'-phosphate
  modified_base 21: mod_base = OTHER; note = 2'-O-methyladenosine-3'-phosphorothioate
  modified_base 22: mod_base = OTHER; note = 2'-O-methyladenosine-3'-phosphorothioate
  modified_base 23: mod_base = OTHER; note = 2'-O-methyluridine
ttgggaatacaggtagtgataat

SEQ ID NO: 391 - RNA, 23 nt, synthetic construct
  source 1..23: mol_type = other RNA
  modified_base 1: mod_base = OTHER; note = 2'-O-methyluridine-3'-phosphorothioate 5'-(E)-Vinylphosphonate
  modified_base 2: mod_base = OTHER; note = 2'-deoxy-2'-fluoroadenosine-3'-phosphorothioate
  modified_base 3: mod_base = OTHER; note = 2'-O-methyluridine-3'-phosphate
  modified_base 4: mod_base = OTHER; note = 2'-O-methylguanosine-3'-phosphate
  modified_base 5: mod_base = OTHER; note = 2'-O-methylguanosine-3'-phosphate
  modified_base 6: mod_base = OTHER; note = 2'-deoxy-2'-fluoroguanosine-3'-phosphate
  modified_base 7: mod_base = OTHER; note = 2'-O-methyladenosine-3'-phosphate
  modified_base 8: mod_base = OTHER; note = 2'-deoxy-2'-fluoroadenosine-3'-phosphate
  modified_base 9: mod_base = OTHER; note = 2'-deoxy-2'-fluorouridine-3'-phosphate
  modified_base 10: mod_base = OTHER; note = 2'-O-methyladenosine-3'-phosphate
  modified_base 11: mod_base = OTHER; note = 2'-O-methylcytidine-3'-phosphate
  modified_base 12: mod_base = OTHER; note = 2'-O-methyladenosine-3'-phosphate
  modified_base 13: mod_base = OTHER; note = 2'-O-methylguanosine-3'-phosphate
  modified_base 14: mod_base = OTHER; note = 2'-deoxy-2'-fluoroguanosine-3'-phosphate
  modified_base 15: mod_base = OTHER; note = 2'-O-methyluridine-3'-phosphate
  modified_base 16: mod_base = OTHER; note = 2'-deoxy-2'-fluoroadenosine-3'-phosphate
  modified_base 17: mod_base = OTHER; note = 2'-O-methylguanosine-3'-phosphate
  modified_base 18: mod_base = OTHER; note = 2'-O-methyluridine-3'-phosphate
  modified_base 19: mod_base = OTHER; note = 2'-O-methylguanosine-3'-phosphate
  modified_base 20: mod_base = OTHER; note = 2'-O-methyladenosine-3'-phosphate
  modified_base 21: mod_base = OTHER; note = 2'-O-methyluridine-3'-phosphorothioate
  modified_base 22: mod_base = OTHER; note = 2'-O-methyladenosine-3'-phosphorothioate
  modified_base 23: mod_base = OTHER; note = 2'-O-methyladenosine
tatgggaatacaggtagtgataa

SEQ ID NO: 392 - RNA, 23 nt, synthetic construct
  source 1..23: mol_type = other RNA
  modified_base 1: mod_base = OTHER; note = 2'-O-methyluridine-3'-phosphorothioate 5'-(E)-Vinylphosphonate
  modified_base 2: mod_base = OTHER; note = 2'-deoxy-2'-fluorouridine-3'-phosphorothioate
  modified_base 3: mod_base = OTHER; note = 2'-O-methyladenosine-3'-phosphate
  modified_base 4: mod_base = OTHER; note = 2'-O-methyladenosine-3'-phosphate
  modified_base 5: mod_base = OTHER; note = 2'-O-methyluridine-3'-phosphate
  modified_base 6: mod_base = OTHER; note = 2'-deoxy-2'-fluoroguanosine-3'-phosphate
  modified_base 7: mod_base = OTHER; note = 2'-O-methylguanosine-3'-phosphate
  modified_base 8: mod_base = OTHER; note = 2'-deoxy-2'-fluoroguanosine-3'-phosphate
  modified_base 9: mod_base = OTHER; note = 2'-deoxy-2'-fluoroadenosine-3'-phosphate
  modified_base 10: mod_base = OTHER; note = 2'-O-methyladenosine-3'-phosphate
  modified_base 11: mod_base = OTHER; note = 2'-O-methyluridine-3'-phosphate
  modified_base 12: mod_base = OTHER; note = 2'-O-methyladenosine-3'-phosphate
  modified_base 13: mod_base = OTHER; note = 2'-O-methylcytidine-3'-phosphate
  modified_base 14: mod_base = OTHER; note = 2'-deoxy-2'-fluoroadenosine-3'-phosphate
  modified_base 15: mod_base = OTHER; note = 2'-O-methylguanosine-3'-phosphate
  modified_base 16: mod_base = OTHER; note = 2'-deoxy-2'-fluoroguanosine-3'-phosphate
  modified_base 17: mod_base = OTHER; note = 2'-O-methyluridine-3'-phosphate
  modified_base 18: mod_base = OTHER; note = 2'-O-methyladenosine-3'-phosphate
  modified_base 19: mod_base = OTHER; note = 2'-O-methylguanosine-3'-phosphate
  modified_base 20: mod_base = OTHER; note = 2'-O-methyluridine-3'-phosphate
  modified_base 21: mod_base = OTHER; note = 2'-O-methylguanosine-3'-phosphorothioate
  modified_base 22: mod_base = OTHER; note = 2'-O-methyladenosine-3'-phosphorothioate
  modified_base 23: mod_base = OTHER; note = 2'-O-methyluridine
ttaatgggaatacaggtagtgat

SEQ ID NO: 393 - RNA, 23 nt, synthetic construct
  source 1..23: mol_type = other RNA
  modified_base 1: mod_base = OTHER; note = 2'-O-methyluridine-3'-phosphorothioate 5'-(E)-Vinylphosphonate
  modified_base 2: mod_base = OTHER; note = 2'-deoxy-2'-fluoroadenosine-3'-phosphorothioate
  modified_base 3: mod_base = OTHER; note = 2'-O-methyladenosine-3'-phosphate
  modified_base 4: mod_base = OTHER; note = 2'-O-methyluridine-3'-phosphate
  modified_base 5: mod_base = OTHER; note = 2'-O-methyluridine-3'-phosphate
  modified_base 6: mod_base = OTHER; note = 2'-deoxy-2'-fluorocytidine-3'-phosphate
  modified_base 7: mod_base = OTHER; note = 2'-O-methyladenosine-3'-phosphate
  modified_base 8: mod_base = OTHER; note = 2'-deoxy-2'-fluorouridine-3'-phosphate
  modified_base 9: mod_base = OTHER; note = 2'-deoxy-2'-fluoroguanosine-3'-phosphate
  modified_base 10: mod_base = OTHER; note = 2'-O-methyladenosine-3'-phosphate
  modified_base 11: mod_base = OTHER; note = 2'-O-methylguanosine-3'-phosphate
  modified_base 12: mod_base = OTHER; note = 2'-O-methyladenosine-3'-phosphate
  modified_base 13: mod_base = OTHER; note = 2'-O-methyladenosine-3'-phosphate
  modified_base 14: mod_base = OTHER; note = 2'-deoxy-2'-fluorouridine-3'-phosphate
  modified_base 15: mod_base = OTHER; note = 2'-O-methylguanosine-3'-phosphate
  modified_base 16: mod_base = OTHER; note = 2'-deoxy-2'-fluorouridine-3'-phosphate
  modified_base 17: mod_base = OTHER; note = 2'-O-methylcytidine-3'-phosphate
  modified_base 18: mod_base = OTHER; note = 2'-O-methylcytidine-3'-phosphate
  modified_base 19: mod_base = OTHER; note = 2'-O-methyluridine-3'-phosphate
  modified_base 20: mod_base = OTHER; note = 2'-O-methylcytidine-3'-phosphate
  modified_base 21: mod_base = OTHER; note = 2'-O-methyladenosine-3'-phosphorothioate
  modified_base 22: mod_base = OTHER; note = 2'-O-methylcytidine-3'-phosphorothioate
  modified_base 23: mod_base = OTHER; note = 2'-O-methyladenosine
taattcatgagaatgtcctcaca

SEQ ID NO: 394 - RNA, 23 nt, synthetic construct
  source 1..23: mol_type = other RNA
  modified_base 1: mod_base = OTHER; note = 2'-O-methyluridine-3'-phosphorothioate 5'-(E)-Vinylphosphonate
  modified_base 2: mod_base = OTHER; note = 2'-deoxy-2'-fluoroadenosine-3'-phosphorothioate
  modified_base 3: mod_base = OTHER; note = 2'-O-methyladenosine-3'-phosphate
  modified_base 4: mod_base = OTHER; note = 2'-O-methyladenosine-3'-phosphate
  modified_base 5: mod_base = OTHER; note = 2'-O-methyluridine-3'-phosphate
  modified_base 6: mod_base = OTHER; note = 2'-deoxy-2'-fluorouridine-3'-phosphate
  modified_base 7: mod_base = OTHER; note = 2'-O-methylcytidine-3'-phosphate
  modified_base 8: mod_base = OTHER; note = 2'-deoxy-2'-fluoroadenosine-3'-phosphate
  modified_base 9: mod_base = OTHER; note = 2'-deoxy-2'-fluorouridine-3'-phosphate
  modified_base 10: mod_base = OTHER; note = 2'-O-methylguanosine-3'-phosphate
  modified_base 11: mod_base = OTHER; note = 2'-O-methyladenosine-3'-phosphate
  modified_base 12: mod_base = OTHER; note = 2'-O-methylguanosine-3'-phosphate
  modified_base 13: mod_base = OTHER; note = 2'-O-methyladenosine-3'-phosphate
  modified_base 14: mod_base = OTHER; note = 2'-deoxy-2'-fluoroadenosine-3'-phosphate
  modified_base 15: mod_base = OTHER; note = 2'-O-methyluridine-3'-phosphate
  modified_base 16: mod_base = OTHER; note = 2'-deoxy-2'-fluoroguanosine-3'-phosphate
  modified_base 17: mod_base = OTHER; note = 2'-O-methyluridine-3'-phosphate
  modified_base 18: mod_base = OTHER; note = 2'-O-methylcytidine-3'-phosphate
  modified_base 19: mod_base = OTHER; note = 2'-O-methylcytidine-3'-phosphate
  modified_base 20: mod_base = OTHER; note = 2'-O-methyluridine-3'-phosphate
  modified_base 21: mod_base = OTHER; note = 2'-O-methylcytidine-3'-phosphorothioate
  modified_base 22: mod_base = OTHER; note = 2'-O-methyladenosine-3'-phosphorothioate
  modified_base 23: mod_base = OTHER; note = 2'-O-methylcytidine
taaattcatgagaatgtcctcac

SEQ ID NO: 395 - RNA, 23 nt, synthetic construct
  source 1..23: mol_type = other RNA
  modified_base 1: mod_base = OTHER; note = 2'-O-methyluridine-3'-phosphorothioate 5'-(E)-Vinylphosphonate
  modified_base 2: mod_base = OTHER; note = 2'-deoxy-2'-fluoroguanosine-3'-phosphorothioate
  modified_base 3: mod_base = OTHER; note = 2'-O-methyladenosine-3'-phosphate
  modified_base 4: mod_base = OTHER; note = 2'-O-methyladenosine-3'-phosphate
  modified_base 5: mod_base = OTHER; note = 2'-O-methyladenosine-3'-phosphate
  modified_base 6: mod_base = OTHER; note = 2'-deoxy-2'-fluorouridine-3'-phosphate
  modified_base 7: mod_base = OTHER; note = 2'-O-methyluridine-3'-phosphate
  modified_base 8: mod_base = OTHER; note = 2'-deoxy-2'-fluorocytidine-3'-phosphate
  modified_base 9: mod_base = OTHER; note = 2'-deoxy-2'-fluoroadenosine-3'-phosphate
  modified_base 10: mod_base = OTHER; note = 2'-O-methyluridine-3'-phosphate
  modified_base 11: mod_base = OTHER; note = 2'-O-methylguanosine-3'-phosphate
  modified_base 12: mod_base = OTHER; note = 2'-O-methyladenosine-3'-phosphate
  modified_base 13: mod_base = OTHER; note = 2'-O-methylguanosine-3'-phosphate
  modified_base 14: mod_base = OTHER; note = 2'-deoxy-2'-fluoroadenosine-3'-phosphate
  modified_base 15: mod_base = OTHER; note = 2'-O-methyladenosine-3'-phosphate
  modified_base 16: mod_base = OTHER; note = 2'-deoxy-2'-fluorouridine-3'-phosphate
  modified_base 17: mod_base = OTHER; note = 2'-O-methylguanosine-3'-phosphate
  modified_base 18: mod_base = OTHER; note = 2'-O-methyluridine-3'-phosphate
  modified_base 19: mod_base = OTHER; note = 2'-O-methylcytidine-3'-phosphate
  modified_base 20: mod_base = OTHER; note = 2'-O-methylcytidine-3'-phosphate
  modified_base 21: mod_base = OTHER; note = 2'-O-methyluridine-3'-phosphorothioate
  modified_base 22: mod_base = OTHER; note = 2'-O-methylcytidine-3'-phosphorothioate
  modified_base 23: mod_base = OTHER; note = 2'-O-methyladenosine
tgaaattcatgagaatgtcctca

SEQ ID NO: 396 - RNA, 23 nt, synthetic construct
  source 1..23: mol_type = other RNA
  modified_base 1: mod_base = OTHER; note = 2'-O-methyluridine-3'-phosphorothioate 5'-(E)-Vinylphosphonate
  modified_base 2: mod_base = OTHER; note = 2'-deoxy-2'-fluoroguanosine-3'-phosphorothioate
  modified_base 3: mod_base = OTHER; note = 2'-O-methylguanosine-3'-phosphate
  modified_base 4: mod_base = OTHER; note = 2'-O-methyladenosine-3'-phosphate
  modified_base 5: mod_base = OTHER; note = 2'-O-methyladenosine-3'-phosphate
  modified_base 6: mod_base = OTHER; note = 2'-deoxy-2'-fluoroadenosine-3'-phosphate
  modified_base 7: mod_base = OTHER; note = 2'-O-methyluridine-3'-phosphate
  modified_base 8: mod_base = OTHER; note = 2'-deoxy-2'-fluorouridine-3'-phosphate
  modified_base 9: mod_base = OTHER; note = 2'-deoxy-2'-fluorocytidine-3'-phosphate
  modified_base 10: mod_base = OTHER; note = 2'-O-methyladenosine-3'-phosphate
  modified_base 11: mod_base = OTHER; note = 2'-O-methyluridine-3'-phosphate
  modified_base 12: mod_base = OTHER; note = 2'-O-methylguanosine-3'-phosphate
  modified_base 13: mod_base = OTHER; note = 2'-O-methyladenosine-3'-phosphate
  modified_base 14: mod_base = OTHER; note = 2'-deoxy-2'-fluoroguanosine-3'-phosphate
  modified_base 15: mod_base = OTHER; note = 2'-O-methyladenosine-3'-phosphate
  modified_base 16: mod_base = OTHER; note = 2'-deoxy-2'-fluoroadenosine-3'-phosphate
  modified_base 17: mod_base = OTHER; note = 2'-O-methyluridine-3'-phosphate
  modified_base 18: mod_base = OTHER; note = 2'-O-methylguanosine-3'-phosphate
  modified_base 19: mod_base = OTHER; note = 2'-O-methyluridine-3'-phosphate
  modified_base 20: mod_base = OTHER; note = 2'-O-methylcytidine-3'-phosphate
  modified_base 21: mod_base = OTHER; note = 2'-O-methylcytidine-3'-phosphorothioate
  modified_base 22: mod_base = OTHER; note = 2'-O-methyluridine-3'-phosphorothioate
  modified_base 23: mod_base = OTHER; note = 2'-O-methylcytidine
tggaaattcatgagaatgtcctc

SEQ ID NO: 397 - RNA, 23 nt, synthetic construct
  source 1..23: mol_type = other RNA
  modified_base 1: mod_base = OTHER; note = 2'-O-methyluridine-3'-phosphorothioate 5'-(E)-Vinylphosphonate
  modified_base 2: mod_base = OTHER; note = 2'-deoxy-2'-fluoroadenosine-3'-phosphorothioate
  modified_base 3: mod_base = OTHER; note = 2'-O-methyluridine-3'-phosphate
  modified_base 4: mod_base = OTHER; note = 2'-O-methyluridine-3'-phosphate
  modified_base 5: mod_base = OTHER; note = 2'-O-methylguanosine-3'-phosphate
  modified_base 6: mod_base = OTHER; note = 2'-deoxy-2'-fluoroguanosine-3'-phosphate
  modified_base 7: mod_base = OTHER; note = 2'-O-methyladenosine-3'-phosphate
  modified_base 8: mod_base = OTHER; note = 2'-deoxy-2'-fluoroguanosine-3'-phosphate
  modified_base 9: mod_base = OTHER; note = 2'-deoxy-2'-fluoroguanosine-3'-phosphate
  modified_base 10: mod_base = OTHER; note = 2'-O-methylcytidine-3'-phosphate
  modified_base 11: mod_base = OTHER; note = 2'-O-methyladenosine-3'-phosphate
  modified_base 12: mod_base = OTHER; note = 2'-O-methyladenosine-3'-phosphate
  modified_base 13: mod_base = OTHER; note = 2'-O-methyluridine-3'-phosphate
  modified_base 14: mod_base = OTHER; note = 2'-deoxy-2'-fluorouridine-3'-phosphate
  modified_base 15: mod_base = OTHER; note = 2'-O-methyluridine-3'-phosphate
  modified_base 16: mod_base = OTHER; note = 2'-deoxy-2'-fluorouridine-3'-phosphate
  modified_base 17: mod_base = OTHER; note = 2'-O-methylguanosine-3'-phosphate
  modified_base 18: mod_base = OTHER; note = 2'-O-methyluridine-3'-phosphate
  modified_base 19: mod_base = OTHER; note = 2'-O-methylcytidine-3'-phosphate
  modified_base 20: mod_base = OTHER; note = 2'-O-methyladenosine-3'-phosphate
  modified_base 21: mod_base = OTHER; note = 2'-O-methylcytidine-3'-phosphorothioate
  modified_base 22: mod_base = OTHER; note = 2'-O-methyladenosine-3'-phosphorothioate
  modified_base 23: mod_base = OTHER; note = 2'-O-methylguanosine
tattggaggcaattttgtcacag

SEQ ID NO: 398 - RNA, 23 nt, synthetic construct
  source 1..23: mol_type = other RNA
  modified_base 1: mod_base = OTHER; note = 2'-O-methyluridine-3'-phosphorothioate 5'-(E)-Vinylphosphonate
  modified_base 2: mod_base = OTHER; note = 2'-deoxy-2'-fluorouridine-3'-phosphorothioate
  modified_base 3: mod_base = OTHER; note = 2'-O-methyluridine-3'-phosphate
  modified_base 4: mod_base = OTHER; note = 2'-O-methylguanosine-3'-phosphate
  modified_base 5: mod_base = OTHER; note = 2'-O-methyladenosine-3'-phosphate
  modified_base 6: mod_base = OTHER; note = 2'-deoxy-2'-fluoroguanosine-3'-phosphate
  modified_base 7: mod_base = OTHER; note = 2'-O-methyladenosine-3'-phosphate
  modified_base 8: mod_base = OTHER; note = 2'-deoxy-2'-fluorocytidine-3'-phosphate
  modified_base 9: mod_base = OTHER; note = 2'-deoxy-2'-fluorouridine-3'-phosphate
  modified_base 10: mod_base = OTHER; note = 2'-O-methyluridine-3'-phosphate
  modified_base 11: mod_base = OTHER; note = 2'-O-methylguanosine-3'-phosphate
  modified_base 12: mod_base = OTHER; note = 2'-O-methylguanosine-3'-phosphate
  modified_base 13: mod_base = OTHER; note = 2'-O-methyluridine-3'-phosphate
  modified_base 14: mod_base = OTHER; note = 2'-deoxy-2'-fluorocytidine-3'-phosphate
  modified_base 15: mod_base = OTHER; note = 2'-O-methyluridine-3'-phosphate
  modified_base 16: mod_base = OTHER; note = 2'-deoxy-2'-fluorouridine-3'-phosphate
  modified_base 17: mod_base = OTHER; note = 2'-O-methyluridine-3'-phosphate
  modified_base 18: mod_base = OTHER; note = 2'-O-methyladenosine-3'-phosphate
  modified_base 19: mod_base = OTHER; note = 2'-O-methyladenosine-3'-phosphate
  modified_base 20: mod_base = OTHER; note = 2'-O-methyladenosine-3'-phosphate
  modified_base 21: mod_base = OTHER; note = 2'-O-methylguanosine-3'-phosphorothioate
  modified_base 22: mod_base = OTHER; note = 2'-O-methyladenosine-3'-phosphorothioate
  modified_base 23: mod_base = OTHER; note = 2'-O-methylguanosine
tttgagacttggtctttaaagag

SEQ ID NO: 399 - RNA, 23 nt, synthetic construct
  source 1..23: mol_type = other RNA
  modified_base 1: mod_base = OTHER; note = 2'-O-methyluridine-3'-phosphorothioate 5'-(E)-Vinylphosphonate
  modified_base 2: mod_base = OTHER; note = 2'-deoxy-2'-fluoroadenosine-3'-phosphorothioate
  modified_base 3: mod_base = OTHER; note = 2'-O-methyladenosine-3'-phosphate
  modified_base 4: mod_base = OTHER; note = 2'-O-methyladenosine-3'-phosphate
  modified_base 5: mod_base = OTHER; note = 2'-O-methylguanosine-3'-phosphate
  modified_base 6: mod_base = OTHER; note = 2'-deoxy-2'-fluorouridine-3'-phosphate
  modified_base 7: mod_base = OTHER; note = 2'-O-methylcytidine-3'-phosphate
  modified_base 8: mod_base = OTHER; note = 2'-deoxy-2'-fluoroguanosine-3'-phosphate
  modified_base 9: mod_base = OTHER; note = 2'-deoxy-2'-fluorouridine-3'-phosphate
  modified_base 10: mod_base = OTHER; note = 2'-O-methyluridine-3'-phosphate
  modified_base 11: mod_base = OTHER; note = 2'-O-methylcytidine-3'-phosphate
  modified_base 12: mod_base = OTHER; note = 2'-O-methyladenosine-3'-phosphate
  modified_base 13: mod_base = OTHER; note = 2'-O-methyladenosine-3'-phosphate
  modified_base 14: mod_base = OTHER; note = 2'-deoxy-2'-fluorouridine-3'-phosphate
  modified_base 15: mod_base = OTHER; note = 2'-O-methylguanosine-3'-phosphate
  modified_base 16: mod_base = OTHER; note = 2'-deoxy-2'-fluorouridine-3'-phosphate
  modified_base 17: mod_base = OTHER; note = 2'-O-methylcytidine-3'-phosphate
  modified_base 18: mod_base = OTHER; note = 2'-O-methyluridine-3'-phosphate
  modified_base 19: mod_base = OTHER; note = 2'-O-methylcytidine-3'-phosphate
  modified_base 20: mod_base = OTHER; note = 2'-O-methyluridine-3'-phosphate
  modified_base 21: mod_base = OTHER; note = 2'-O-methylguanosine-3'-phosphorothioate
  modified_base 22: mod_base = OTHER; note = 2'-O-methyluridine-3'-phosphorothioate
  modified_base 23: mod_base = OTHER; note = 2'-O-methyladenosine
taaagtcgttcaatgtctctgta

SEQ ID NO: 400 - RNA, 23 nt, synthetic construct
  source 1..23: mol_type = other RNA
  modified_base 1: mod_base = OTHER; note = 2'-O-methyluridine-3'-phosphorothioate 5'-(E)-Vinylphosphonate
  modified_base 2: mod_base = OTHER; note = 2'-deoxy-2'-fluorocytidine-3'-phosphorothioate
  modified_base 3: mod_base = OTHER; note = 2'-O-methyladenosine-3'-phosphate
  modified_base 4: mod_base = OTHER; note = 2'-O-methyladenosine-3'-phosphate
  modified_base 5: mod_base = OTHER; note = 2'-O-methyladenosine-3'-phosphate
  modified_base 6: mod_base = OTHER; note = 2'-deoxy-2'-fluoroguanosine-3'-phosphate
  modified_base 7: mod_base = OTHER; note = 2'-O-methyluridine-3'-phosphate
  modified_base 8: mod_base = OTHER; note = 2'-deoxy-2'-fluorocytidine-3'-phosphate
  modified_base 9: mod_base = OTHER; note = 2'-deoxy-2'-fluoroguanosine-3'-phosphate
  modified_base 10: mod_base = OTHER; note = 2'-O-methyluridine-3'-phosphate
  modified_base 11: mod_base = OTHER; note = 2'-O-methyluridine-3'-phosphate
  modified_base 12: mod_base = OTHER; note = 2'-O-methylcytidine-3'-phosphate
  modified_base 13: mod_base = OTHER; note = 2'-O-methyladenosine-3'-phosphate
  modified_base 14: mod_base = OTHER; note = 2'-deoxy-2'-fluoroadenosine-3'-phosphate
  modified_base 15: mod_base = OTHER; note = 2'-O-methyluridine-3'-phosphate
  modified_base 16: mod_base = OTHER; note = 2'-deoxy-2'-fluoroguanosine-3'-phosphate
  modified_base 17: mod_base = OTHER; note = 2'-O-methyluridine-3'-phosphate
  modified_base 18: mod_base = OTHER; note = 2'-O-methylcytidine-3'-phosphate
  modified_base 19: mod_base = OTHER; note = 2'-O-methyluridine-3'-phosphate
  modified_base 20: mod_base = OTHER; note = 2'-O-methylcytidine-3'-phosphate
  modified_base 21: mod_base = OTHER; note = 2'-O-methyluridine-3'-phosphorothioate
  modified_base 22: mod_base = OTHER; note = 2'-O-methylguanosine-3'-phosphorothioate
  modified_base 23: mod_base = OTHER; note = 2'-O-methyluridine
tcaaagtcgttcaatgtctctgt

SEQ ID NO: 401 - RNA, 23 nt, synthetic construct
  source 1..23: mol_type = other RNA
  modified_base 1: mod_base = OTHER; note = 2'-O-methyluridine-3'-phosphorothioate 5'-(E)-Vinylphosphonate
  modified_base 2: mod_base = OTHER; note = 2'-deoxy-2'-fluoroguanosine-3'-phosphorothioate
  modified_base 3: mod_base = OTHER; note = 2'-O-methyladenosine-3'-phosphate
  modified_base 4: mod_base = OTHER; note = 2'-O-methylguanosine-3'-phosphate
  modified_base 5: mod_base = OTHER; note = 2'-O-methyluridine-3'-phosphate
  modified_base 6: mod_base = OTHER; note = 2'-deoxy-2'-fluorouridine-3'-phosphate
  modified_base 7: mod_base = OTHER; note = 2'-O-methyluridine-3'-phosphate
  modified_base 8: mod_base = OTHER; note = 2'-deoxy-2'-fluorouridine-3'-phosphate
  modified_base 9: mod_base = OTHER; note = 2'-deoxy-2'-fluoroguanosine-3'-phosphate
  modified_base 10: mod_base = OTHER; note = 2'-O-methyluridine-3'-phosphate
  modified_base 11: mod_base = OTHER; note = 2'-O-methylcytidine-3'-phosphate
  modified_base 12: mod_base = OTHER; note = 2'-O-methyladenosine-3'-phosphate
  modified_base 13: mod_base = OTHER; note = 2'-O-methylcytidine-3'-phosphate
  modified_base 14: mod_base = OTHER; note = 2'-deoxy-2'-fluorouridine-3'-phosphate
  modified_base 15: mod_base = OTHER; note = 2'-O-methylguanosine-3'-phosphate
  modified_base 16: mod_base = OTHER; note = 2'-deoxy-2'-fluorouridine-3'-phosphate
  modified_base 17: mod_base = OTHER; note = 2'-O-methylguanosine-3'-phosphate
  modified_base 18: mod_base = OTHER; note = 2'-O-methyluridine-3'-phosphate
  modified_base 19: mod_base = OTHER; note = 2'-O-methyluridine-3'-phosphate
  modified_base 20: mod_base = OTHER; note = 2'-O-methylcytidine-3'-phosphate
  modified_base 21: mod_base = OTHER; note = 2'-O-methyladenosine-3'-phosphorothioate
  modified_base 22: mod_base = OTHER; note = 2'-O-methyluridine-3'-phosphorothioate
  modified_base 23: mod_base = OTHER; note = 2'-O-methylcytidine
tgagttttgtcactgtgttcatc

SEQ ID NO: 402 - RNA, 23 nt, synthetic construct
  source 1..23: mol_type = other RNA
  modified_base 1: mod_base = OTHER; note = 2'-O-methyluridine-3'-phosphorothioate 5'-(E)-Vinylphosphonate
  modified_base 2: mod_base = OTHER; note = 2'-deoxy-2'-fluorocytidine-3'-phosphorothioate
  modified_base 3: mod_base = OTHER; note = 2'-O-methylguanosine-3'-phosphate
  modified_base 4: mod_base = OTHER; note = 2'-O-methyladenosine-3'-phosphate
  modified_base 5: mod_base = OTHER; note = 2'-O-methylguanosine-3'-phosphate
  modified_base 6: mod_base = OTHER; note = 2'-deoxy-2'-fluorouridine-3'-phosphate
  modified_base 7: mod_base = OTHER; note = 2'-O-methyluridine-3'-phosphate
  modified_base 8: mod_base = OTHER; note = 2'-deoxy-2'-fluorouridine-3'-phosphate
  modified_base 9: mod_base = OTHER; note = 2'-deoxy-2'-fluorouridine-3'-phosphate
  modified_base 10: mod_base = OTHER; note = 2'-O-methylguanosine-3'-phosphate
  modified_base 11: mod_base = OTHER; note = 2'-O-methyluridine-3'-phosphate
  modified_base 12: mod_base = OTHER; note = 2'-O-methylcytidine-3'-phosphate
  modified_base 13: mod_base = OTHER; note = 2'-O-methyladenosine-3'-phosphate
  modified_base 14: mod_base = OTHER; note = 2'-deoxy-2'-fluorocytidine-3'-phosphate
  modified_base 15: mod_base = OTHER; note = 2'-O-methyluridine-3'-phosphate
  modified_base 16: mod_base = OTHER; note = 2'-deoxy-2'-fluoroguanosine-3'-phosphate
  modified_base 17: mod_base = OTHER; note = 2'-O-methyluridine-3'-phosphate
  modified_base 18: mod_base = OTHER; note = 2'-O-methylguanosine-3'-phosphate
  modified_base 19: mod_base = OTHER; note = 2'-O-methyluridine-3'-phosphate
  modified_base 20: mod_base = OTHER; note = 2'-O-methyluridine-3'-phosphate
  modified_base 21: mod_base = OTHER; note = 2'-O-methylcytidine-3'-phosphorothioate
  modified_base 22: mod_base = OTHER; note = 2'-O-methyladenosine-3'-phosphorothioate
  modified_base 23: mod_base = OTHER; note = 2'-O-methyluridine
tcgagttttgtcactgtgttcat

SEQ ID NO: 403 - RNA, 23 nt, synthetic construct
  source 1..23: mol_type = other RNA
  modified_base 1: mod_base = OTHER; note = 2'-O-methyluridine-3'-phosphorothioate 5'-(E)-Vinylphosphonate
  modified_base 2: mod_base = OTHER; note = 2'-deoxy-2'-fluoroadenosine-3'-phosphorothioate
  modified_base 3: mod_base = OTHER; note = 2'-O-methyladenosine-3'-phosphate
  modified_base 4: mod_base = OTHER; note = 2'-O-methylcytidine-3'-phosphate
  modified_base 5: mod_base = OTHER; note = 2'-O-methyluridine-3'-phosphate
  modified_base 6: mod_base = OTHER; note = 2'-deoxy-2'-fluoroguanosine-3'-phosphate
  modified_base 7: mod_base = OTHER; note = 2'-O-methyluridine-3'-phosphate
  modified_base 8: mod_base = OTHER; note = 2'-deoxy-2'-fluoroadenosine-3'-phosphate
  modified_base 9: mod_base = OTHER; note = 2'-deoxy-2'-fluorocytidine-3'-phosphate
  modified_base 10: mod_base = OTHER; note = 2'-O-methyladenosine-3'-phosphate
  modified_base 11: mod_base = OTHER; note = 2'-O-methylcytidine-3'-phosphate
  modified_base 12: mod_base = OTHER; note = 2'-O-methyladenosine-3'-phosphate
  modified_base 13: mod_base = OTHER; note = 2'-O-methyladenosine-3'-phosphate
  modified_base 14: mod_base = OTHER; note = 2'-deoxy-2'-fluorocytidine-3'-phosphate
  modified_base 15: mod_base = OTHER; note = 2'-O-methylcytidine-3'-phosphate
  modified_base 16: mod_base = OTHER; note = 2'-deoxy-2'-fluorouridine-3'-phosphate
  modified_base 17: mod_base = OTHER; note = 2'-O-methyladenosine-3'-phosphate
  modified_base 18: mod_base = OTHER; note = 2'-O-methylguanosine-3'-phosphate
  modified_base 19: mod_base = OTHER; note = 2'-O-methyluridine-3'-phosphate
  modified_base 20: mod_base = OTHER; note = 2'-O-methyluridine-3'-phosphate
  modified_base 21: mod_base = OTHER; note = 2'-O-methylguanosine-3'-phosphorothioate
  modified_base 22: mod_base = OTHER; note = 2'-O-methyluridine-3'-phosphorothioate
  modified_base 23: mod_base = OTHER; note = 2'-O-methylguanosine
taactgtacacaacctagttgtg

SEQ ID NO: 404 - RNA, 23 nt, synthetic construct
  source 1..23: mol_type = other RNA
  modified_base 1: mod_base = OTHER; note = 2'-O-methyluridine-3'-phosphorothioate 5'-(E)-Vinylphosphonate
  modified_base 2: mod_base = OTHER; note = 2'-deoxy-2'-fluorouridine-3'-phosphorothioate
  modified_base 3: mod_base = OTHER; note = 2'-O-methylcytidine-3'-phosphate
  modified_base 4: mod_base = OTHER; note = 2'-O-methylcytidine-3'-phosphate
  modified_base 5: mod_base = OTHER; note = 2'-O-methyladenosine-3'-phosphate
  modified_base 6: mod_base = OTHER; note = 2'-deoxy-2'-fluorouridine-3'-phosphate
  modified_base 7: mod_base = OTHER; note = 2'-O-methyladenosine-3'-phosphate
  modified_base 8: mod_base = OTHER; note = 2'-deoxy-2'-fluoroadenosine-3'-phosphate
  modified_base 9: mod_base = OTHER; note = 2'-deoxy-2'-fluorouridine-3'-phosphate
  modified_base 10: mod_base = OTHER; note = 2'-O-methyluridine-3'-phosphate
  modified_base 11: mod_base = OTHER; note = 2'-O-methyladenosine-3'-phosphate
  modified_base 12: mod_base = OTHER; note = 2'-O-methyladenosine-3'-phosphate
  modified_base 13: mod_base = OTHER; note = 2'-O-methyladenosine-3'-phosphate
  modified_base 14: mod_base = OTHER; note = 2'-deoxy-2'-fluorocytidine-3'-phosphate
  modified_base 15: mod_base = OTHER; note = 2'-O-methyluridine-3'-phosphate
  modified_base 16: mod_base = OTHER; note = 2'-deoxy-2'-fluoroguanosine-3'-phosphate
  modified_base 17: mod_base = OTHER; note = 2'-O-methyluridine-3'-phosphate
  modified_base 18: mod_base = OTHER; note = 2'-O-methyladenosine-3'-phosphate
  modified_base 19: mod_base = OTHER; note = 2'-O-methylcytidine-3'-phosphate
  modified_base 20: mod_base = OTHER; note = 2'-O-methyladenosine-3'-phosphate
  modified_base 21: mod_base = OTHER; note = 2'-O-methylcytidine-3'-phosphorothioate
  modified_base 22: mod_base = OTHER; note = 2'-O-methyladenosine-3'-phosphorothioate
  modified_base 23: mod_base = OTHER; note = 2'-O-methyladenosine
ttccataattaaactgtacacaa

SEQ ID NO: 405 - RNA, 23 nt, synthetic construct
  source 1..23: mol_type = other RNA
tcttgtgtttatttacaatcctc

SEQ ID NO: 406 - RNA, 23 nt, synthetic construct
  source 1..23: mol_type = other RNA
tgtttatttacaatcctcttgac

SEQ ID NO: 407 - RNA, 23 nt, synthetic construct
  source 1..23: mol_type = other RNA
cctttctttccttgggatcaatt

SEQ ID NO: 408 - RNA, 23 nt, synthetic construct
  source 1..23: mol_type = other RNA
ccttgggatcaattggaaaacga

SEQ ID NO: 409 - RNA, 23 nt, synthetic construct
  source 1..23: mol_type = other RNA
aactcgagcatctacaaaggcaa

SEQ ID NO: 410 - RNA, 23 nt, synthetic construct
  source 1..23: mol_type = other RNA
tggagtcctgcttcgatttcacc

SEQ ID NO: 411 - RNA, 23 nt, synthetic construct
  source 1..23: mol_type = other RNA
ggagtcctgcttcgatttcaccc

SEQ ID NO: 412 - RNA, 23 nt, synthetic construct
  source 1..23: mol_type = other RNA
ttcaccctttgcaagaaaaacgg

SEQ ID NO: 413 - RNA, 23 nt, synthetic construct
  source 1..23: mol_type = other RNA
caccctttgcaagaaaaacggct

SEQ ID NO: 414 - RNA, 23 nt, synthetic construct
  source 1..23: mol_type = other RNA
agaaaaacggcttcaaagtctac

SEQ ID NO: 415 - RNA, 23 nt, synthetic construct
  source 1..23: mol_type = other RNA
aaaacggcttcaaagtctacgtg

SEQ ID NO: 416 - RNA, 23 nt, synthetic construct
  source 1..23: mol_type = other RNA
agttaccaaaacattctagcggc

SEQ ID NO: 417 - RNA, 23 nt, synthetic construct
  source 1..23: mol_type = other RNA
ctctttgtcttgagtctggatac

SEQ ID NO: 418 - RNA, 23 nt, synthetic construct
  source 1..23: mol_type = other RNA
gtcttgagtctggatactttaga

SEQ ID NO: 419 - RNA, 23 nt, synthetic construct
  source 1..23: mol_type = other RNA
gagtctggatactttagacagag

SEQ ID NO: 420 - RNA, 23 nt, synthetic construct
  source 1..23: mol_type = other RNA
atgtgcacaatttgagatccaaa

SEQ ID NO: 421 - RNA, 23 nt, synthetic construct
  source 1..23: mol_type = other RNA
ttgtggaacaatggtaggaatca

SEQ ID NO: 422 - RNA, 23 nt, synthetic construct
  source 1..23: mol_type = other RNA
tggaacaatggtaggaatcattt

SEQ ID NO: 423 - RNA, 23 nt, synthetic construct
  source 1..23: mol_type = other RNA
gcatcagtactgaaaacttccga

SEQ ID NO: 424 - RNA, 23 nt, synthetic construct
  source 1..23: mol_type = other RNA
catcagtactgaaaacttccgac

SEQ ID NO: 425 - RNA, 23 nt, synthetic construct
  source 1..23: mol_type = other RNA
atcagtactgaaaacttccgacc

SEQ ID NO: 426 - RNA, 23 nt, synthetic construct
  source 1..23: mol_type = other RNA
gtactgaaaacttccgaccaaac

SEQ ID NO: 427 - RNA, 23 nt, synthetic construct
  source 1..23: mol_type = other RNA
aaacttccgaccaaactttgatg

SEQ ID NO: 428 - RNA, 23 nt, synthetic construct
  source 1..23: mol_type = other RNA
tccgaccaaactttgatgtttct

SEQ ID NO: 429 - RNA, 23 nt, synthetic construct
  source 1..23: mol_type = other RNA
cctcttttctaaggatcatccca

SEQ ID NO: 430 - RNA, 23 nt, synthetic construct
  source 1..23: mol_type = other RNA
ctcttttctaaggatcatcccag

SEQ ID NO: 431 - RNA, 23 nt, synthetic construct
  source 1..23: mol_type = other RNA
ccaggaatgccttatatcacgtc

SEQ ID NO: 432 - RNA, 23 nt, synthetic construct
  source 1..23: mol_type = other RNA
caggaatgccttatatcacgtcc

SEQ ID NO: 433 - RNA, 23 nt, synthetic construct
  source 1..23: mol_type = other RNA
ggaatgccttatatcacgtccat

SEQ ID NO: 434 - RNA, 23 nt, synthetic construct
  source 1..23: mol_type = other RNA
gaatgccttatatcacgtccata

SEQ ID NO: 435 - RNA, 23 nt, synthetic construct
  source 1..23: mol_type = other RNA
aatgccttatatcacgtccataa

SEQ ID NO: 436 - RNA, 23 nt, synthetic construct
  source 1..23: mol_type = other RNA
atgccttatatcacgtccataac

SEQ ID NO: 437 - RNA, 23 nt, synthetic construct
  source 1..23: mol_type = other RNA
gccttatatcacgtccataacgg

SEQ ID NO: 438 - RNA, 23 nt, synthetic construct
  source 1..23: mol_type = other RNA
ccttatatcacgtccataacggg

SEQ ID NO: 439 - RNA, 23 nt, synthetic construct
  source 1..23: mol_type = other RNA
caaaagcacaaggattctcgctg

SEQ ID NO: 440 - RNA, 23 nt, synthetic construct
  source 1..23: mol_type = other RNA
gaaatatgattatcgggaaatgc

SEQ ID NO: 441 - RNA, 23 nt, synthetic construct
  source 1..23: mol_type = other RNA
aaatatgattatcgggaaatgct

SEQ ID NO: 442 - RNA, 23 nt, synthetic construct
  source 1..23: mol_type = other RNA
gatgagagattgctattacagat

SEQ ID NO: 443 - RNA, 23 nt, synthetic construct
  source 1..23: mol_type = other RNA
atgagagattgctattacagatt

SEQ ID NO: 444 - RNA, 23 nt, synthetic construct
  source 1..23: mol_type = other RNA
ttgctattacagattccttctac

SEQ ID NO: 445 - RNA, 23 nt, synthetic construct
  source 1..23: mol_type = other RNA
attacagattccttctacaatca

SEQ ID NO: 446 - RNA, 23 nt, synthetic construct
  source 1..23: mol_type = other RNA
cagattccttctacaatcaggtc

SEQ ID NO: 447 - RNA, 23 nt, synthetic construct
  source 1..23: mol_type = other RNA
tccttctacaatcaggtctattc

SEQ ID NO: 448 - RNA, 23 nt, synthetic construct
  source 1..23: mol_type = other RNA
tctacaatcaggtctattcatca

SEQ ID NO: 449 - RNA, 23 nt, synthetic construct
  source 1..23: mol_type = other RNA
tcaggtctattcatcaggataaa

SEQ ID NO: 450 - RNA, 23 nt, synthetic construct
  source 1..23: mol_type = other RNA
ttttcttcagttgagaagattgt

SEQ ID NO: 451 - RNA, 23 nt, synthetic construct
  source 1..23: mol_type = other RNA
tttcttcagttgagaagattgta

SEQ ID NO: 452 - RNA, 23 nt, synthetic construct
  source 1..23: mol_type = other RNA
ttcagttgagaagattgtattaa

SEQ ID NO: 453 - RNA, 23 nt, synthetic construct
  source 1..23: mol_type = other RNA
cagttgagaagattgtattaact

SEQ ID NO: 454 - RNA, 23 nt, synthetic construct
  source 1..23: mol_type = other RNA
agaagattgtattaactacacta

SEQ ID NO: 455 - RNA, 23 nt, synthetic construct
  source 1..23: mol_type = other RNA
gattgtattaactacactagaga

SEQ ID NO: 456 - RNA, 23 nt, synthetic construct
  source 1..23: mol_type = other RNA
ttgtattaactacactagagatt

SEQ ID NO: 457 - RNA, 23 nt, synthetic construct
  source 1..23: mol_type = other RNA
tgtattaactacactagagatta

SEQ ID NO: 458 - RNA, 23 nt, synthetic construct
  source 1..23: mol_type = other RNA
gaatattcaagcacatatcacgt

SEQ ID NO: 459 - RNA, 23 nt, synthetic construct
  source 1..23: mol_type = other RNA
atattcaagcacatatcacgtaa

SEQ ID NO: 460 - RNA, 23 nt, synthetic construct
  source 1..23: mol_type = other RNA
tattcaagcacatatcacgtaac

SEQ ID NO: 461 - RNA, 23 nt, synthetic construct
  source 1..23: mol_type = other RNA
attcaagcacatatcacgtaaca

SEQ ID NO: 462 - RNA, 23 nt, synthetic construct
  source 1..23: mol_type = other RNA
caagcacatatcacgtaacagtt

SEQ ID NO: 463 - RNA, 23 nt, synthetic construct
  source 1..23: mol_type = other RNA
aacagtttaatatggaacaaaca

SEQ ID NO: 464 - RNA, 23 nt, synthetic construct
  source 1..23: mol_type = other RNA
aacatcctggaggattgttcgtc

SEQ ID NO: 465 - RNA, 23 nt, synthetic construct
  source 1..23: mol_type = other RNA
agatttcccttactactatgcta

SEQ ID NO: 466 - RNA, 23 nt, synthetic construct
  source 1..23: mol_type = other RNA
gatttcccttactactatgctaa

SEQ ID NO: 467 - RNA, 23 nt, synthetic construct
  source 1..23: mol_type = other RNA
atttcccttactactatgctaat

SEQ ID NO: 468 - RNA, 23 nt, synthetic construct
  source 1..23: mol_type = other RNA
tttcccttactactatgctaatt

SEQ ID NO: 469 - RNA, 23 nt, synthetic construct
  source 1..23: mol_type = other RNA
ttcccttactactatgctaattt

SEQ ID NO: 470 - RNA, 23 nt, synthetic construct
  source 1..23: mol_type = other RNA
cttactactatgctaatttaggt

SEQ ID NO: 471 - RNA, 23 nt, synthetic construct
  source 1..23: mol_type = other RNA
tagttctgtggaattgtgacaag

SEQ ID NO: 472 - RNA, 23 nt, synthetic construct
  source 1..23: mol_type = other RNA
gctttcaactacggaagtggatt

SEQ ID NO: 473 - RNA, 23 nt, synthetic construct
  source 1..23: mol_type = other RNA
gtcatttctgggataactcaaag

SEQ ID NO: 474 - RNA, 23 nt, synthetic construct
  source 1..23: mol_type = other RNA
catttctgggataactcaaagga

SEQ ID NO: 475 - RNA, 23 nt, synthetic construct
  source 1..23: mol_type = other RNA
agctgctatctaccacaaatatt

SEQ ID NO: 476 - RNA, 23 nt, synthetic construct
  source 1..23: mol_type = other RNA
gctgctatctaccacaaatatta

SEQ ID NO: 477 - RNA, 23 nt, synthetic construct
  source 1..23: mol_type = other RNA
atctaccacaaatattatcacta

SEQ ID NO: 478 - RNA, 23 nt, synthetic construct
  source 1..23: mol_type = other RNA
tctaccacaaatattatcactac

SEQ ID NO: 479 - RNA, 23 nt, synthetic construct
  source 1..23: mol_type = other RNA
ctaccacaaatattatcactacc

SEQ ID NO: 480 - RNA, 23 nt, synthetic construct
  source 1..23: mol_type = other RNA
accacaaatattatcactacctg

SEQ ID NO: 481 - RNA, 23 nt, synthetic construct
  source 1..23: mol_type = other RNA
attatcactacctgtattcccat

SEQ ID NO: 482 - RNA, 23 nt, synthetic construct
  source 1..23: mol_type = other RNA
ttatcactacctgtattcccatt

SEQ ID NO: 483 - RNA, 23 nt, synthetic construct
  source 1..23: mol_type = other RNA
atcactacctgtattcccattac

SEQ ID NO: 484 - RNA, 23 nt, synthetic construct
  source 1..23: mol_type = other RNA
tgtgaggacattctcatgaattt

SEQ ID NO: 485 - RNA, 23 nt, synthetic construct
  source 1..23: mol_type = other RNA
gtgaggacattctcatgaatttc

SEQ ID NO: 486 - RNA, 23 nt, synthetic construct
  source 1..23: mol_type = other RNA
tgaggacattctcatgaatttcc

SEQ ID NO: 487 - RNA, 23 nt, synthetic construct
  source 1..23: mol_type = other RNA
gaggacattctcatgaatttcct

SEQ ID NO: 488 - RNA, 23 nt, synthetic construct
  source 1..23: mol_type = other RNA
ctgtgacaaaattgcctccaatc

SEQ ID NO: 489 - RNA, 23 nt, synthetic construct
  source 1..23: mol_type = other RNA
ctctttaaagaccaagtctcaat

SEQ ID NO: 490 - RNA, 23 nt, synthetic construct
  source 1..23: mol_type = other RNA
tacagagacattgaacgactttg

SEQ ID NO: 491 - RNA, 23 nt, synthetic construct
  source 1..23: mol_type = other RNA
acagagacattgaacgactttga

SEQ ID NO: 492 - RNA, 23 nt, synthetic construct
  source 1..23: mol_type = other RNA
gatgaacacagtgacaaaactcg

SEQ ID NO: 493 - RNA, 23 nt, synthetic construct
  source 1..23: mol_type = other RNA
atgaacacagtgacaaaactcgg

SEQ ID NO: 494 - RNA, 23 nt, synthetic construct
  source 1..23: mol_type = other RNA
cacaactaggttgtgtacagttt

SEQ ID NO: 495 - RNA, 23 nt, synthetic construct
  source 1..23: mol_type = other RNA
ttgtgtacagtttaattatggaa

SEQ ID NO: 496 - RNA, 21 nt, synthetic construct
  source 1..21: mol_type = other RNA
cagtcaagtccaacatccgga

SEQ ID NO: 497 - RNA, 21 nt, synthetic construct
  source 1..21: mol_type = other RNA
aagcaccgaatctactacgta

SEQ ID NO: 498 - RNA, 21 nt, synthetic construct
  source 1..21: mol_type = other RNA
catacgtgtttcgatgtctaa

SEQ ID NO: 499 - RNA, 21 nt, synthetic construct
  source 1..21: mol_type = other RNA
atacgtgtttcgatgtctaca

SEQ ID NO: 500 - RNA, 21 nt, synthetic construct
  source 1..21: mol_type = other RNA
tacgtgtttcgatgtctacca

SEQ ID NO: 501 - RNA, 21 nt, synthetic construct
  source 1..21: mol_type = other RNA
gtgtttcgatgtctaccgcta

SEQ ID NO: 502 - RNA, 21 nt, synthetic construct
  source 1..21: mol_type = other RNA
tgtttcgatgtctaccgctga

SEQ ID NO: 503 - RNA, 21 nt, synthetic construct
  source 1..21: mol_type = other RNA
caaaatcaaggtgtacatcta

SEQ ID NO: 504 - RNA, 21 nt, synthetic construct
  source 1..21: mol_type = other RNA
ccgggagtacaatgaactgca

SEQ ID NO: 505 - RNA, 21 nt, synthetic construct
  source 1..21: mol_type = other RNA
cgggagtacaatgaactgcta

SEQ ID NO: 506 - RNA, 21 nt, synthetic construct
  source 1..21: mol_type = other RNA
acaaatcacctgctgttcaaa

SEQ ID NO: 507 - RNA, 21 nt, synthetic construct
  source 1..21: mol_type = other RNA
ctacctggacttaccggcaga

SEQ ID NO: 508 - RNA, 21 nt, synthetic construct
  source 1..21: mol_type = other RNA
tacgatgtcagcattcctgta

SEQ ID NO: 509 - RNA, 21 nt, synthetic construct
  source 1..21: mol_type = other RNA
tcagcattcctgttttcagca

SEQ ID NO: 510 - RNA, 21 nt, synthetic construct
  source 1..21: mol_type = other RNA
actgtcctctcagatggccaa

SEQ ID NO: 511 - RNA, 21 nt, synthetic construct
  source 1..21: mol_type = other RNA
ccctgagtacagagaggaaca

SEQ ID NO: 512 - RNA, 21 nt, synthetic construct
  source 1..21: mol_type = other RNA
acagagaggaactagaagcca

SEQ ID NO: 513 - RNA, 21 nt, synthetic construct
  source 1..21: mol_type = other RNA
gttagtcttggacaaatgcaa

SEQ ID NO: 514 - RNA, 21 nt, synthetic construct
  source 1..21: mol_type = other RNA
tggacaaatgcaccaatctca

SEQ ID NO: 515 - RNA, 21 nt, synthetic construct
  source 1..21: mol_type = other RNA
ggacaaatgcaccaatctcta

SEQ ID NO: 516 - RNA, 21 nt, synthetic construct
  source 1..21: mol_type = other RNA
tgcaggaggctactttttgta

SEQ ID NO: 517 - RNA, 21 nt, synthetic construct
  source 1..21: mol_type = other RNA
gcaggaggctactttttgtaa

SEQ ID NO: 518 - RNA, 21 nt, synthetic construct
  source 1..21: mol_type = other RNA
caggaggctactttttgtaca

SEQ ID NO: 519 - RNA, 21 nt, synthetic construct
  source 1..21: mol_type = other RNA
aggaggctactttttgtacga

SEQ ID NO: 520 - RNA, 21 nt, synthetic construct
  source 1..21: mol_type = other RNA
ggaggctactttttgtacgga

SEQ ID NO: 521 - RNA, 21 nt, synthetic construct
  source 1..21: mol_type = other RNA
gaggctactttttgtacggta

SEQ ID NO: 522 - RNA, 21 nt, synthetic construct
  source 1..21: mol_type = other RNA
tgtgtcccagttgtcattgca

SEQ ID NO: 523 - RNA, 21 nt, synthetic construct
  source 1..21: mol_type = other RNA
cccagttgtcattgcagacta

SEQ ID NO: 524 - RNA, 21 nt, synthetic construct
  source 1..21: mol_type = other RNA
ccagttgtcattgcagactca

SEQ ID NO: 525 - RNA, 21 nt, synthetic construct
  source 1..21: mol_type = other RNA
gttgtcattgcagactcttaa

SEQ ID NO: 526 - RNA, 21 nt, synthetic construct
  source 1..21: mol_type = other RNA
ctcttatattctgcctttcta

SEQ ID NO: 527 - RNA, 21 nt, synthetic construct
  source 1..21: mol_type = other RNA
tctggactggaagagggcata

SEQ ID NO: 528 - RNA, 21 nt, synthetic construct
  source 1..21: mol_type = other RNA
gatgtcagatgtgtacagcaa

SEQ ID NO: 529 - RNA, 21 nt, synthetic construct
  source 1..21: mol_type = other RNA
accctacagatcatcaatgaa

SEQ ID NO: 530 - RNA, 21 nt, synthetic construct
  source 1..21: mol_type = other RNA
agatcatcaatgacaggatca

SEQ ID NO: 531 - RNA, 21 nt, synthetic construct
  source 1..21: mol_type = other RNA
tcaatgacaggatctatccaa

SEQ ID NO: 532 - RNA, 21 nt, synthetic construct
  source 1..21: mol_type = other RNA
caatgacaggatctatccata

SEQ ID NO: 533 - RNA, 21 nt, synthetic construct
  source 1..21: mol_type = other RNA
aatgacaggatctatccataa

SEQ ID NO: 534 - RNA, 21 nt, synthetic construct
  source 1..21: mol_type = other RNA
atgacaggatctatccatata

SEQ ID NO: 535 - RNA, 21 nt, synthetic construct
  source 1..21: mol_type = other RNA
gacaggatctatccatatgca

SEQ ID NO: 536 - RNA, 21 nt, synthetic construct
  source 1..21: mol_type = other RNA
acaggatctatccatatgcaa

SEQ ID NO: 537 - RNA, 21 nt, synthetic construct
  source 1..21: mol_type = other RNA
tctcctatgaagagtggaata

SEQ ID NO: 538 - RNA, 21 nt, synthetic construct
  source 1..21: mol_type = other RNA
ctcctatgaagagtggaatga

SEQ ID NO: 539 - RNA, 21 nt, synthetic construct
  source 1..21: mol_type = other RNA
cctatgaagagtggaatgaca

SEQ ID NO: 540 - RNA, 21 nt, synthetic construct
  source 1..21: mol_type = other RNA
agagtggaatgaccctcctga

SEQ ID NO: 541 - RNA, 21 nt, synthetic construct
  source 1..21: mol_type = other RNA
gagtggaatgaccctcctgca

SEQ ID NO: 542 - RNA, 21 nt, synthetic construct
  source 1..21: mol_type = other RNA
gaccctcctgctgtgaagtga

SEQ ID NO: 543 - RNA, 21 nt, synthetic construct
  source 1..21: mol_type = other RNA
ctgctgtgaagtgggctagta

SEQ ID NO: 544 - RNA, 21 nt, synthetic construct
  source 1..21: mol_type = other RNA
gtgggctagtgtgagcaacca

SEQ ID NO: 545 - RNA, 21 nt, synthetic construct
  source 1..21: mol_type = other RNA
ggtggtctggaataatcagaa

SEQ ID NO: 546 - RNA, 21 nt, synthetic construct
  source 1..21: mol_type = other RNA
tggtctggaataatcagaata

SEQ ID NO: 547 - RNA, 21 nt, synthetic construct
  source 1..21: mol_type = other RNA
ggtctggaataatcagaataa

SEQ ID NO: 548 - RNA, 21 nt, synthetic construct
  source 1..21: mol_type = other RNA
aataatcagaataaaaaccca

SEQ ID NO: 549 - RNA, 21 nt, synthetic construct
  source 1..21: mol_type = other RNA
ataatcagaataaaaacccta

SEQ ID NO: 550 - RNA, 21 nt, synthetic construct
  source 1..21: mol_type = other RNA
taatcagaataaaaaccctca

SEQ ID NO: 551 - RNA, 21 nt, synthetic construct
  source 1..21: mol_type = other RNA
aatcagaataaaaaccctcca

SEQ ID NO: 552 - RNA, 21 nt, synthetic construct
  source 1..21: mol_type = other RNA
ctgcagaaaacaagctaagta

SEQ ID NO: 553 - RNA, 21 nt, synthetic construct
  source 1..21: mol_type = other RNA
agaaaacaagctaagtaatca

SEQ ID NO: 554 - RNA, 21 nt, synthetic construct
  source 1..21: mol_type = other RNA
aaacaagctaagtaatcgtta

SEQ ID NO: 555 - RNA, 21 nt, synthetic construct
  source 1..21: mol_type = other RNA
aacaagctaagtaatcgttta

SEQ ID NO: 556 - RNA, 21 nt, synthetic construct
  source 1..21: mol_type = other RNA
acaagctaagtaatcgtttca

SEQ ID NO: 557 - RNA, 21 nt, synthetic construct
  source 1..21: mol_type = other RNA
caagctaagtaatcgtttcta

SEQ ID NO: 558 - RNA, 21 nt, synthetic construct
  source 1..21: mol_type = other RNA
aagctaagtaatcgtttctta

SEQ ID NO: 559 - RNA, 21 nt, synthetic construct
  source 1..21: mol_type = other RNA
agctaagtaatcgtttcttca

SEQ ID NO: 560 - RNA, 21 nt, synthetic construct
  source 1..21: mol_type = other RNA
gctaagtaatcgtttcttcca

SEQ ID NO: 561 - RNA, 21 nt, synthetic construct
  source 1..21: mol_type = other RNA
ctaagtaatcgtttcttccca

SEQ ID NO: 562 - RNA, 21 nt, synthetic construct
  source 1..21: mol_type = other RNA
taatcgtttcttcccttacga

SEQ ID NO: 563 - RNA, 21 nt, synthetic construct
  source 1..21: mol_type = other RNA
aatcgtttcttcccttacgaa

SEQ ID NO: 564 - RNA, 21 nt, synthetic construct
  source 1..21: mol_type = other RNA
ccttacgacgaaatcgagaca

SEQ ID NO: 565 - RNA, 21 nt, synthetic construct
  source 1..21: mol_type = other RNA
acgagctgcagtttggttata

SEQ ID NO: 566 - RNA, 21 nt, synthetic construct
  source 1..21: mol_type = other RNA
gagctgcagtttggttatgaa

SEQ ID NO: 567 - RNA, 21 nt, synthetic construct
  source 1..21: mol_type = other RNA
tactcacatgaactgtgaaga

SEQ ID NO: 568 - RNA, 21 nt, synthetic construct
  source 1..21: mol_type = other RNA
catgaactgtgaagatattga

SEQ ID NO: 569 - RNA, 21 nt, synthetic construct
  source 1..21: mol_type = other RNA
atgaactgtgaagatattgca

SEQ ID NO: 570 - RNA, 21 nt, synthetic construct
  source 1..21: mol_type = other RNA
tgaactgtgaagatattgcca

SEQ ID NO: 571 - RNA, 21 nt, synthetic construct
  source 1..21: mol_type = other RNA
ctgtgaagatattgccatgaa

SEQ ID NO: 572 - RNA, 21 nt, synthetic construct
  source 1..21: mol_type = other RNA
gtgaagatattgccatgaata

SEQ ID NO: 573 - RNA, 21 nt, synthetic construct
  source 1..21: mol_type = other RNA
ggaaagctgtcatcaaggtaa

SEQ ID NO: 574 - RNA, 21 nt, synthetic construct
  source 1..21: mol_type = other RNA
gaaagctgtcatcaaggtaaa

SEQ ID NO: 575 - RNA, 21 nt, synthetic construct
  source 1..21: mol_type = other RNA
aaagctgtcatcaaggtaaca

SEQ ID NO: 576 - RNA, 21 nt, synthetic construct
  source 1..21: mol_type = other RNA
aagctgtcatcaaggtaacca

SEQ ID NO: 577 - RNA, 21 nt, synthetic construct
  source 1..21: mol_type = other RNA
ttcaagtgtcctgagtgcaca

SEQ ID NO: 578 - RNA, 21 nt, synthetic construct
  source 1..21: mol_type = other RNA
ctagaccagactcacatggta

SEQ ID NO: 579 - RNA, 21 nt, synthetic construct
  source 1..21: mol_type = other RNA
tagaccagactcacatggtaa

SEQ ID NO: 580 - RNA, 21 nt, synthetic construct
  source 1..21: mol_type = other RNA
aacaagtttgcttccgtctta

SEQ ID NO: 581 - RNA, 21 nt, synthetic construct
  source 1..21: mol_type = other RNA
aagtttgcttccgtcttcgga

SEQ ID NO: 582 - RNA, 21 nt, synthetic construct
  source 1..21: mol_type = other RNA
agtttgcttccgtcttcggaa

SEQ ID NO: 583 - RNA, 21 nt, synthetic construct
  source 1..21: mol_type = other RNA
gtttgcttccgtcttcggaaa

SEQ ID NO: 584 - RNA, 21 nt, synthetic construct
  source 1..21: mol_type = other RNA
tttgcttccgtcttcggaaca

SEQ ID NO: 585 - RNA, 21 nt, synthetic construct
  source 1..21: mol_type = other RNA
ttgcttccgtcttcggaacga

SEQ ID NO: 586 - RNA, 21 nt, synthetic construct
  source 1..21: mol_type = other RNA
tgcttccgtcttcggaacgaa

SEQ ID NO: 587 - RNA, 21 nt, synthetic construct
  source 1..21: mol_type = other RNA
gcttccgtcttcggaacgata

SEQ ID NO: 588 - RNA, 21 nt, synthetic construct
  source 1..21: mol_type = other RNA
cttccgtcttcggaacgatga

SEQ ID NO: 589 - RNA, 21 nt, synthetic construct
  source 1..21: mol_type = other RNA
ttgttttggctttttgatata

SEQ ID NO: 590 - RNA, 23 nt, synthetic construct
  source 1..23: mol_type = other RNA
taccgtacaaaaagtagcctcct

SEQ ID NO: 591 - RNA, 23 nt, synthetic construct
  source 1..23: mol_type = other RNA
tgcaatgacaactgggacacagc

SEQ ID NO: 592 - RNA, 23 nt, synthetic construct
  source 1..23: mol_type = other RNA
tagtctgcaatgacaactgggac

SEQ ID NO: 593 - RNA, 23 nt, synthetic construct
  source 1..23: mol_type = other RNA
tgagtctgcaatgacaactggga

SEQ ID NO: 594 - RNA, 23 nt, synthetic construct
  source 1..23: mol_type = other RNA
ttaagagtctgcaatgacaactg

SEQ ID NO: 595 - RNA, 23 nt, synthetic construct
  source 1..23: mol_type = other RNA
tagaaaggcagaatataagagtc

SEQ ID NO: 596 - RNA, 23 nt, synthetic construct
  source 1..23: mol_type = other RNA
tatgccctcttccagtccagaac

SEQ ID NO: 597 - RNA, 23 nt, synthetic construct
  source 1..23: mol_type = other RNA
ttgctgtacacatctgacatctt

SEQ ID NO: 598 - RNA, 23 nt, synthetic construct
  source 1..23: mol_type = other RNA
ttcattgatgatctgtagggtgg

SEQ ID NO: 599 - RNA, 23 nt, synthetic construct
  source 1..23: mol_type = other RNA
tgatcctgtcattgatgatctgt

SEQ ID NO: 600 - RNA, 23 nt, synthetic construct
  source 1..23: mol_type = other RNA
ttggatagatcctgtcattgatg

SEQ ID NO: 601 - RNA, 23 nt, synthetic construct
  source 1..23: mol_type = other RNA
tatggatagatcctgtcattgat

SEQ ID NO: 602 - RNA, 23 nt, synthetic construct
  source 1..23: mol_type = other RNA
ttatggatagatcctgtcattga

SEQ ID NO: 603 - RNA, 23 nt, synthetic construct
  source 1..23: mol_type = other RNA
tatatggatagatcctgtcattg

SEQ ID NO: 604 - RNA, 23 nt, synthetic construct
  source 1..23: mol_type = other RNA
tgcatatggatagatcctgtcat

SEQ ID NO: 605 - RNA, 23 nt, synthetic construct
  source 1..23: mol_type = other RNA
ttgcatatggatagatcctgtca

SEQ ID NO: 606 - RNA, 23 nt, synthetic construct
  source 1..23: mol_type = other RNA
tattccactcttcataggagatg

SEQ ID NO: 607 - RNA, 23 nt, synthetic construct
  source 1..23: mol_type = other RNA
tcattccactcttcataggagat

SEQ ID NO: 608 - RNA, 23 nt, synthetic construct
  source 1..23: mol_type = other RNA
tgtcattccactcttcataggag

SEQ ID NO: 609 - RNA, 23 nt, synthetic construct
  source 1..23: mol_type = other RNA
tcaggagggtcattccactcttc

SEQ ID NO: 610 - RNA, 23 nt, synthetic construct
  source 1..23: mol_type = other RNA
tgcaggagggtcattccactctt

SEQ ID NO: 611 - RNA, 23 nt, synthetic construct
  source 1..23: mol_type = other RNA
tcacttcacagcaggagggtcat

SEQ ID NO: 612 - RNA, 23 nt, synthetic construct
  source 1..23: mol_type = other RNA
tactagcccacttcacagcagga

SEQ ID NO: 613 - RNA, 23 nt, synthetic construct
  source 1..23: mol_type = other RNA
tggttgctcacactagcccactt

SEQ ID NO: 614 - RNA, 23 nt, synthetic construct
  source 1..23: mol_type = other RNA
ttctgattattccagaccaccag

SEQ ID NO: 615 - RNA, 23 nt, synthetic construct
  source 1..23: mol_type = other RNA
tattctgattattccagaccacc

SEQ ID NO: 616 - RNA, 23 nt, synthetic construct
  source 1..23: mol_type = other RNA
ttattctgattattccagaccac

SEQ ID NO: 617 - RNA, 23 nt, synthetic construct
  source 1..23: mol_type = other RNA
tgggtttttattctgattattcc

SEQ ID NO: 618 - RNA, 23 nt, synthetic construct
  source 1..23: mol_type = other RNA
tagggtttttattctgattattc

SEQ ID NO: 619 - RNA, 23 nt, synthetic construct
  source 1..23: mol_type = other RNA
tgagggtttttattctgattatt

SEQ ID NO: 620 - RNA, 23 nt, synthetic construct
  source 1..23: mol_type = other RNA
tggagggtttttattctgattat

SEQ ID NO: 621 - RNA, 23 nt, synthetic construct
  source 1..23: mol_type = other RNA
tacttagcttgttttctgcagtc

SEQ ID NO: 622 - RNA, 23 nt, synthetic construct
  source 1..23: mol_type = other RNA
tgattacttagcttgttttctgc

SEQ ID NO: 623 - RNA, 23 nt, synthetic construct
  source 1..23: mol_type = other RNA
taacgattacttagcttgttttc

SEQ ID NO: 624 - RNA, 23 nt, synthetic construct
  source 1..23: mol_type = other RNA
taaacgattacttagcttgtttt

SEQ ID NO: 625 - RNA, 23 nt, synthetic construct
  source 1..23: mol_type = other RNA
tgaaacgattacttagcttgttt

SEQ ID NO: 626 - RNA, 23 nt, synthetic construct
  source 1..23: mol_type = other RNA
tagaaacgattacttagcttgtt

SEQ ID NO: 627 - RNA, 23 nt, synthetic construct
  source 1..23: mol_type = other RNA
taagaaacgattacttagcttgt

SEQ ID NO: 628 - RNA, 23 nt, synthetic construct
  source 1..23: mol_type = other RNA
tgaagaaacgattacttagcttg

SEQ ID NO: 629 - RNA, 23 nt, synthetic construct
  source 1..23: mol_type = other RNA
tggaagaaacgattacttagctt

SEQ ID NO: 630 - RNA, 23 nt, synthetic construct
  source 1..23: mol_type = other RNA
tgggaagaaacgattacttagct

SEQ ID NO: 631 - RNA, 23 nt, synthetic construct
  source 1..23: mol_type = other RNA
tcgtaagggaagaaacgattact

SEQ ID NO: 632 - RNA, 23 nt, synthetic construct
  source 1..23: mol_type = other RNA
ttcgtaagggaagaaacgattac

SEQ ID NO: 633 - RNA, 23 nt, synthetic construct
  source 1..23: mol_type = other RNA
tgtctcgatttcgtcgtaaggga

SEQ ID NO: 634 - RNA, 23 nt, synthetic construct
  source 1..23: mol_type = other RNA
tataaccaaactgcagctcgtca

SEQ ID NO: 635 - RNA, 23 nt, synthetic construct
  source 1..23: mol_type = other RNA
ttcataaccaaactgcagctcgt

SEQ ID NO: 636 - RNA, 23 nt, synthetic construct
  source 1..23: mol_type = other RNA
tcttcacagttcatgtgagtatc

SEQ ID NO: 637 - RNA, 23 nt, synthetic construct
  source 1..23: mol_type = other RNA
tcaatatcttcacagttcatgtg

SEQ ID NO: 638 - RNA, 23 nt, synthetic construct
  source 1..23: mol_type = other RNA
tgcaatatcttcacagttcatgt

SEQ ID NO: 639 - RNA, 23 nt, synthetic construct
  source 1..23: mol_type = other RNA
tggcaatatcttcacagttcatg

SEQ ID NO: 640 - RNA, 23 nt, synthetic construct
  source 1..23: mol_type = other RNA
ttcatggcaatatcttcacagtt

SEQ ID NO: 641 - RNA, 23 nt, synthetic construct
  source 1..23: mol_type = other RNA
tattcatggcaatatcttcacag

SEQ ID NO: 642 - RNA, 23 nt, synthetic construct
  source 1..23: mol_type = other RNA
ttaccttgatgacagctttccct

SEQ ID NO: 643 - RNA, 23 nt, synthetic construct
  source 1..23: mol_type = other RNA
tttaccttgatgacagctttccc

SEQ ID NO: 644 - RNA, 23 nt, synthetic construct
  source 1..23: mol_type = other RNA
tgttaccttgatgacagctttcc

SEQ ID NO: 645 - RNA, 23 nt, synthetic construct
  source 1..23: mol_type = other RNA
tggttaccttgatgacagctttc

SEQ ID NO: 646 - RNA, 23 nt, synthetic construct
  source 1..23: mol_type = other RNA
tgtgcactcaggacacttgaact

SEQ ID NO: 647 - RNA, 23 nt, synthetic construct
  source 1..23: mol_type = other RNA
taccatgtgagtctggtctaggg

SEQ ID NO: 648 - RNA, 23 nt, synthetic construct
  source 1..23: mol_type = other RNA
ttaccatgtgagtctggtctagg

SEQ ID NO: 649 - RNA, 23 nt, synthetic construct
  source 1..23: mol_type = other RNA
taagacggaagcaaacttgttga

SEQ ID NO: 650 - RNA, 23 nt, synthetic construct
  source 1..23: mol_type = other RNA
tccgaagacggaagcaaacttgt

SEQ ID NO: 651 - RNA, 23 nt, synthetic construct
  source 1..23: mol_type = other RNA
ttccgaagacggaagcaaacttg

SEQ ID NO: 652 - RNA, 23 nt, synthetic construct
  source 1..23: mol_type = other RNA
tttccgaagacggaagcaaactt

SEQ ID NO: 653 - RNA, 23 nt, synthetic construct
  source 1..23: mol_type = other RNA
tgttccgaagacggaagcaaact

SEQ ID NO: 654 - RNA, 23 nt, synthetic construct
  source 1..23: mol_type = other RNA
tcgttccgaagacggaagcaaac

SEQ ID NO: 655 - RNA, 23 nt, synthetic construct
  source 1..23: mol_type = other RNA
ttcgttccgaagacggaagcaaa

SEQ ID NO: 656 - RNA, 23 nt, synthetic construct
  source 1..23: mol_type = other RNA
tatcgttccgaagacggaagcaa

SEQ ID NO: 657 - RNA, 23 nt, synthetic construct
  source 1..23: mol_type = other RNA
tcatcgttccgaagacggaagca

SEQ ID NO: 658 - RNA, 23 nt, synthetic construct
  source 1..23: mol_type = other RNA
tatatcaaaaagccaaaacaaag

SEQ ID NO: 659 - RNA, 21 nt, synthetic construct
  source 1..21: mol_type = other RNA
  modified_base 1: mod_base = OTHER; note = 2'-O-methylcytidine-3'-phosphorothioate
  modified_base 2: mod_base = OTHER; note = 2'-O-methyladenosine-3'-phosphorothioate
  modified_base 3: mod_base = OTHER; note = 2'-O-methylguanosine-3'-phosphate
  modified_base 4: mod_base = OTHER; note = 2'-O-methyluridine-3'-phosphate
  modified_base 5: mod_base = OTHER; note = 2'-O-methylcytidine-3'-phosphate
  modified_base 6: mod_base = OTHER; note = 2'-O-methyladenosine-3'-phosphate
  modified_base 7: mod_base = OTHER; note = 2'-deoxy-2'-fluoroadenosine-3'-phosphate
  modified_base 8: mod_base = OTHER; note = 2'-O-methylguanosine-3'-phosphate
  modified_base 9: mod_base = OTHER; note = 2'-deoxy-2'-fluorouridine-3'-phosphate
  modified_base 10: mod_base = OTHER; note = 2'-deoxy-2'-fluorocytidine-3'-phosphate
  modified_base 11: mod_base = OTHER; note = 2'-deoxy-2'-fluorocytidine-3'-phosphate
  modified_base 12: mod_base = OTHER; note = 2'-O-methyladenosine-3'-phosphate
  modified_base 13: mod_base = OTHER; note = 2'-O-methyladenosine-3'-phosphate
  modified_base 14: mod_base = OTHER; note = 2'-O-methylcytidine-3'-phosphate
  modified_base 15: mod_base = OTHER; note = 2'-O-methyladenosine-3'-phosphate
  modified_base 16: mod_base = OTHER; note = 2'-O-methyluridine-3'-phosphate
  modified_base 17: mod_base = OTHER; note = 2'-O-methylcytidine-3'-phosphate
  modified_base 18: mod_base = OTHER; note = 2'-O-methylcytidine-3'-phosphate
  modified_base 19: mod_base = OTHER; note = 2'-O-methylguanosine-3'-phosphate
  modified_base 20: mod_base = OTHER; note = 2'-O-methylguanosine-3'-phosphate
  modified_base 21: mod_base = OTHER; note = 2'-O-methyladenosine-3'-phosphate ((2S,4R)-1-[29-[[2-(acetylamino)-2-deoxy-beta-D-galactopyra nosyl]oxy]-14,14-bis[[3-[[3-[[5-[[2-(acetylamino)-2-deoxy-b eta-D-galactopyranosyl]oxy]-1-oxopentyl]amino]propyl]amino] -3-oxopropoxy]methyl]-1,12,19,25-tetraoxo-16-oxa-13,20,24-t riazanonacos-1-yl]-4-hydroxy-2-pyrrolidinyl)methyl ester
cagtcaagtccaacatccgga

SEQ ID NO: 660 - RNA, 21 nt, synthetic construct
  source 1..21: mol_type = other RNA
  modified_base 1: mod_base = OTHER; note = 2'-O-methyladenosine-3'-phosphorothioate
  modified_base 2: mod_base = OTHER; note = 2'-O-methyladenosine-3'-phosphorothioate
  modified_base 3: mod_base = OTHER; note = 2'-O-methylguanosine-3'-phosphate
  modified_base 4: mod_base = OTHER; note = 2'-O-methylcytidine-3'-phosphate
  modified_base 5: mod_base = OTHER; note = 2'-O-methyladenosine-3'-phosphate
  modified_base 6: mod_base = OTHER; note = 2'-O-methylcytidine-3'-phosphate
  modified_base 7: mod_base = OTHER; note = 2'-deoxy-2'-fluorocytidine-3'-phosphate
  modified_base 8: mod_base = OTHER; note = 2'-O-methylguanosine-3'-phosphate
  modified_base 9: mod_base = OTHER; note = 2'-deoxy-2'-fluoroadenosine-3'-phosphate
  modified_base 10: mod_base = OTHER; note = 2'-deoxy-2'-fluoroadenosine-3'-phosphate
  modified_base 11: mod_base = OTHER; note = 2'-deoxy-2'-fluorouridine-3'-phosphate
  modified_base 12: mod_base = OTHER; note = 2'-O-methylcytidine-3'-phosphate
  modified_base 13: mod_base = OTHER; note = 2'-O-methyluridine-3'-phosphate
  modified_base 14: mod_base = OTHER; note = 2'-O-methyladenosine-3'-phosphate
  modified_base 15: mod_base = OTHER; note = 2'-O-methylcytidine-3'-phosphate
  modified_base 16: mod_base = OTHER; note = 2'-O-methyluridine-3'-phosphate
  modified_base 17: mod_base = OTHER; note = 2'-O-methyladenosine-3'-phosphate
  modified_base 18: mod_base = OTHER; note = 2'-O-methylcytidine-3'-phosphate
  modified_base 19: mod_base = OTHER; note = 2'-O-methylguanosine-3'-phosphate
  modified_base 20: mod_base = OTHER; note = 2'-O-methyluridine-3'-phosphate
  modified_base 21: mod_base = OTHER; note = 2'-O-methyladenosine-3'-phosphate ((2S,4R)-1-[29-[[2-(acetylamino)-2-deoxy-beta-D-galactopyra nosyl]oxy]-14,14-bis[[3-[[3-[[5-[[2-(acetylamino)-2-deoxy-b eta-D-galactopyranosyl]oxy]-1-oxopentyl]amino]propyl]amino] -3-oxopropoxy]methyl]-1,12,19,25-tetraoxo-16-oxa-13,20,24-t riazanonacos-1-yl]-4-hydroxy-2-pyrrolidinyl)methyl ester
aagcaccgaatctactacgta

SEQ ID NO: 661 - RNA, 21 nt, synthetic construct
  source 1..21: mol_type = other RNA
  modified_base 1: mod_base = OTHER; note = 2'-O-methylcytidine-3'-phosphorothioate
  modified_base 2: mod_base = OTHER; note = 2'-O-methyladenosine-3'-phosphorothioate
  modified_base 3: mod_base = OTHER; note = 2'-O-methyluridine-3'-phosphate
  modified_base 4: mod_base = OTHER; note = 2'-O-methyladenosine-3'-phosphate
  modified_base 5: mod_base = OTHER; note = 2'-O-methylcytidine-3'-phosphate
  modified_base 6: mod_base = OTHER; note = 2'-O-methylguanosine-3'-phosphate
  modified_base 7: mod_base = OTHER; note = 2'-deoxy-2'-fluorouridine-3'-phosphate
  modified_base 8: mod_base = OTHER; note = 2'-O-methylguanosine-3'-phosphate
  modified_base 9: mod_base = OTHER; note = 2'-deoxy-2'-fluorouridine-3'-phosphate
  modified_base 10: mod_base = OTHER; note = 2'-deoxy-2'-fluorouridine-3'-phosphate
  modified_base 11: mod_base = OTHER; note = 2'-deoxy-2'-fluorouridine-3'-phosphate
  modified_base 12: mod_base = OTHER; note = 2'-O-methylcytidine-3'-phosphate
  modified_base 13: mod_base = OTHER; note = 2'-O-methylguanosine-3'-phosphate
  modified_base 14: mod_base = OTHER; note = 2'-O-methyladenosine-3'-phosphate
  modified_base 15: mod_base = OTHER; note = 2'-O-methyluridine-3'-phosphate
  modified_base 16: mod_base = OTHER; note = 2'-O-methylguanosine-3'-phosphate
  modified_base 17: mod_base = OTHER; note = 2'-O-methyluridine-3'-phosphate
  modified_base 18: mod_base = OTHER; note = 2'-O-methylcytidine-3'-phosphate
  modified_base 19: mod_base = OTHER; note = 2'-O-methyluridine-3'-phosphate
  modified_base 20: mod_base = OTHER; note = 2'-O-methyladenosine-3'-phosphate
  modified_base 21: mod_base = OTHER; note = 2'-O-methyladenosine-3'-phosphate ((2S,4R)-1-[29-[[2-(acetylamino)-2-deoxy-beta-D-galactopyra nosyl]oxy]-14,14-bis[[3-[[3-[[5-[[2-(acetylamino)-2-deoxy-b eta-D-galactopyranosyl]oxy]-1-oxopentyl]amino]propyl]amino] -3-oxopropoxy]methyl]-1,12,19,25-tetraoxo-16-oxa-13,20,24-t riazanonacos-1-yl]-4-hydroxy-2-pyrrolidinyl)methyl ester
catacgtgtttcgatgtctaa

SEQ ID NO: 662 - RNA, 21 nt, synthetic construct
  source 1..21: mol_type = other RNA
  modified_base 1: mod_base = OTHER; note = 2'-O-methyladenosine-3'-phosphorothioate
  modified_base 2: mod_base = OTHER; note = 2'-O-methyluridine-3'-phosphorothioate
  modified_base 3: mod_base = OTHER; note = 2'-O-methyladenosine-3'-phosphate
  modified_base 4: mod_base = OTHER; note = 2'-O-methylcytidine-3'-phosphate
  modified_base 5: mod_base = OTHER; note = 2'-O-methylguanosine-3'-phosphate
  modified_base 6: mod_base = OTHER; note = 2'-O-methyluridine-3'-phosphate
  modified_base 7: mod_base = OTHER; note = 2'-deoxy-2'-fluoroguanosine-3'-phosphate
  modified_base 8: mod_base = OTHER; note = 2'-O-methyluridine-3'-phosphate
  modified_base 9: mod_base = OTHER; note = 2'-deoxy-2'-fluorouridine-3'-phosphate
  modified_base 10: mod_base = OTHER; note = 2'-deoxy-2'-fluorouridine-3'-phosphate
  modified_base 11: mod_base = OTHER; note = 2'-deoxy-2'-fluorocytidine-3'-phosphate
  modified_base 12: mod_base = OTHER; note = 2'-O-methylguanosine-3'-phosphate
  modified_base 13: mod_base = OTHER; note = 2'-O-methyladenosine-3'-phosphate
  modified_base 14: mod_base = OTHER; note = 2'-O-methyluridine-3'-phosphate
  modified_base 15: mod_base = OTHER; note = 2'-O-methylguanosine-3'-phosphate
  modified_base 16: mod_base = OTHER; note = 2'-O-methyluridine-3'-phosphate
  modified_base 17: mod_base = OTHER; note = 2'-O-methylcytidine-3'-phosphate
  modified_base 18: mod_base = OTHER; note = 2'-O-methyluridine-3'-phosphate
  modified_base 19: mod_base = OTHER; note = 2'-O-methyladenosine-3'-phosphate
  modified_base 20: mod_base = OTHER; note = 2'-O-methylcytidine-3'-phosphate
  modified_base 21: mod_base = OTHER; note = 2'-O-methyladenosine-3'-phosphate ((2S,4R)-1-[29-[[2-(acetylamino)-2-deoxy-beta-D-galactopyra nosyl]oxy]-14,14-bis[[3-[[3-[[5-[[2-(acetylamino)-2-deoxy-b eta-D-galactopyranosyl]oxy]-1-oxopentyl]amino]propyl]amino] -3-oxopropoxy]methyl]-1,12,19,25-tetraoxo-16-oxa-13,20,24-t riazanonacos-1-yl]-4-hydroxy-2-pyrrolidinyl)methyl ester
atacgtgtttcgatgtctaca

SEQ ID NO: 663 - RNA, 21 nt, synthetic construct
  source 1..21: mol_type = other RNA
  modified_base 1: mod_base = OTHER; note = 2'-O-methyluridine-3'-phosphorothioate
  modified_base 2: mod_base = OTHER; note = 2'-O-methyladenosine-3'-phosphorothioate
  modified_base 3: mod_base = OTHER; note = 2'-O-methylcytidine-3'-phosphate
  modified_base 4: mod_base = OTHER; note = 2'-O-methylguanosine-3'-phosphate
  modified_base 5: mod_base = OTHER; note = 2'-O-methyluridine-3'-phosphate
  modified_base 6: mod_base = OTHER; note = 2'-O-methylguanosine-3'-phosphate
  modified_base 7: mod_base = OTHER; note = 2'-deoxy-2'-fluorouridine-3'-phosphate
  modified_base 8: mod_base = OTHER; note = 2'-O-methyluridine-3'-phosphate
  modified_base 9: mod_base = OTHER; note = 2'-deoxy-2'-fluorouridine-3'-phosphate
  modified_base 10: mod_base = OTHER; note = 2'-deoxy-2'-fluorocytidine-3'-phosphate
  modified_base 11: mod_base = OTHER; note = 2'-deoxy-2'-fluoroguanosine-3'-phosphate
  modified_base 12: mod_base = OTHER; note = 2'-O-methyladenosine-3'-phosphate
  modified_base 13: mod_base = OTHER; note = 2'-O-methyluridine-3'-phosphate
  modified_base 14: mod_base = OTHER; note = 2'-O-methylguanosine-3'-phosphate
  modified_base 15: mod_base = OTHER; note = 2'-O-methyluridine-3'-phosphate
  modified_base 16: mod_base = OTHER; note = 2'-O-methylcytidine-3'-phosphate
  modified_base 17: mod_base = OTHER; note = 2'-O-methyluridine-3'-phosphate
  modified_base 18: mod_base = OTHER; note = 2'-O-methyladenosine-3'-phosphate
  modified_base 19: mod_base = OTHER; note = 2'-O-methylcytidine-3'-phosphate
  modified_base 20: mod_base = OTHER; note = 2'-O-methylcytidine-3'-phosphate
  modified_base 21: mod_base = OTHER; note = 2'-O-methyladenosine-3'-phosphate ((2S,4R)-1-[29-[[2-(acetylamino)-2-deoxy-beta-D-galactopyra nosyl]oxy]-14,14-bis[[3-[[3-[[5-[[2-(acetylamino)-2-deoxy-b eta-D-galactopyranosyl]oxy]-1-oxopentyl]amino]propyl]amino] -3-oxopropoxy]methyl]-1,12,19,25-tetraoxo-16-oxa-13,20,24-t riazanonacos-1-yl]-4-hydroxy-2-pyrrolidinyl)methyl ester
tacgtgtttcgatgtctacca

SEQ ID NO: 664 - RNA, 21 nt, synthetic construct
  source 1..21: mol_type = other RNA
  modified_base 1: mod_base = OTHER; note = 2'-O-methylguanosine-3'-phosphorothioate
  modified_base 2: mod_base = OTHER; note = 2'-O-methyluridine-3'-phosphorothioate
  modified_base 3: mod_base = OTHER; note = 2'-O-methylguanosine-3'-phosphate
  modified_base 4: mod_base = OTHER; note = 2'-O-methyluridine-3'-phosphate
  modified_base 5: mod_base = OTHER; note = 2'-O-methyluridine-3'-phosphate
  modified_base 6: mod_base = OTHER; note = 2'-O-methyluridine-3'-phosphate
  modified_base 7: mod_base = OTHER; note = 2'-deoxy-2'-fluorocytidine-3'-phosphate
  modified_base 8: mod_base = OTHER; note = 2'-O-methylguanosine-3'-phosphate
  modified_base 9: mod_base = OTHER; note = 2'-deoxy-2'-fluoroadenosine-3'-phosphate
  modified_base 10: mod_base = OTHER; note = 2'-deoxy-2'-fluorouridine-3'-phosphate
  modified_base 11: mod_base = OTHER; note = 2'-deoxy-2'-fluoroguanosine-3'-phosphate
  modified_base 12: mod_base = OTHER; note = 2'-O-methyluridine-3'-phosphate
  modified_base 13: mod_base = OTHER; note = 2'-O-methylcytidine-3'-phosphate
  modified_base 14: mod_base = OTHER; note = 2'-O-methyluridine-3'-phosphate
  modified_base 15: mod_base = OTHER; note = 2'-O-methyladenosine-3'-phosphate
  modified_base 16: mod_base = OTHER; note = 2'-O-methylcytidine-3'-phosphate
  modified_base 17: mod_base = OTHER; note = 2'-O-methylcytidine-3'-phosphate
  modified_base 18: mod_base = OTHER; note = 2'-O-methylguanosine-3'-phosphate
  modified_base 19: mod_base = OTHER; note = 2'-O-methylcytidine-3'-phosphate
  modified_base 20: mod_base = OTHER; note = 2'-O-methyluridine-3'-phosphate
  modified_base 21: mod_base = OTHER; note = 2'-O-methyladenosine-3'-phosphate ((2S,4R)-1-[29-[[2-(acetylamino)-2-deoxy-beta-D-galactopyra nosyl]oxy]-14,14-bis[[3-[[3-[[5-[[2-(acetylamino)-2-deoxy-b eta-D-galactopyranosyl]oxy]-1-oxopentyl]amino]propyl]amino] -3-oxopropoxy]methyl]-1,12,19,25-tetraoxo-16-oxa-13,20,24-t riazanonacos-1-yl]-4-hydroxy-2-pyrrolidinyl)methyl ester
gtgtttcgatgtctaccgcta

SEQ ID NO: 665 - RNA, 21 nt, synthetic construct
  source 1..21: mol_type = other RNA
  modified_base 1: mod_base = OTHER; note = 2'-O-methyluridine-3'-phosphorothioate
  modified_base 2: mod_base = OTHER; note = 2'-O-methylguanosine-3'-phosphorothioate
  modified_base 3: mod_base = OTHER; note = 2'-O-methyluridine-3'-phosphate
  modified_base 4: mod_base = OTHER; note = 2'-O-methyluridine-3'-phosphate
  modified_base 5: mod_base = OTHER; note = 2'-O-methyluridine-3'-phosphate
  modified_base 6: mod_base = OTHER; note = 2'-O-methylcytidine-3'-phosphate
  modified_base 7: mod_base = OTHER; note = 2'-deoxy-2'-fluoroguanosine-3'-phosphate
  modified_base 8: mod_base = OTHER; note = 2'-O-methyladenosine-3'-phosphate
  modified_base 9: mod_base = OTHER; note = 2'-deoxy-2'-fluorouridine-3'-phosphate
  modified_base 10: mod_base = OTHER; note = 2'-deoxy-2'-fluoroguanosine-3'-phosphate
  modified_base 11: mod_base = OTHER; note = 2'-deoxy-2'-fluorouridine-3'-phosphate
  modified_base 12: mod_base = OTHER; note = 2'-O-methylcytidine-3'-phosphate
  modified_base 13: mod_base = OTHER; note = 2'-O-methyluridine-3'-phosphate
  modified_base 14: mod_base = OTHER; note = 2'-O-methyladenosine-3'-phosphate
  modified_base 15: mod_base = OTHER; note = 2'-O-methylcytidine-3'-phosphate
  modified_base 16: mod_base = OTHER; note = 2'-O-methylcytidine-3'-phosphate
  modified_base 17: mod_base = OTHER; note = 2'-O-methylguanosine-3'-phosphate
  modified_base 18: mod_base = OTHER; note = 2'-O-methylcytidine-3'-phosphate
  modified_base 19: mod_base = OTHER; note = 2'-O-methyluridine-3'-phosphate
  modified_base 20: mod_base = OTHER; note = 2'-O-methylguanosine-3'-phosphate
  modified_base 21: mod_base = OTHER; note = 2'-O-methyladenosine-3'-phosphate ((2S,4R)-1-[29-[[2-(acetylamino)-2-deoxy-beta-D-galactopyra nosyl]oxy]-14,14-bis[[3-[[3-[[5-[[2-(acetylamino)-2-deoxy-b eta-D-galactopyranosyl]oxy]-1-oxopentyl]amino]propyl]amino] -3-oxopropoxy]methyl]-1,12,19,25-tetraoxo-16-oxa-13,20,24-t riazanonacos-1-yl]-4-hydroxy-2-pyrrolidinyl)methyl ester
tgtttcgatgtctaccgctga

SEQ ID NO: 666 - RNA, 21 nt, synthetic construct
  source 1..21: mol_type = other RNA
  modified_base 1: mod_base = OTHER; note = 2'-O-methylcytidine-3'-phosphorothioate
  modified_base 2: mod_base = OTHER; note = 2'-O-methyladenosine-3'-phosphorothioate
  modified_base 3: mod_base = OTHER; note = 2'-O-methyladenosine-3'-phosphate
  modified_base 4: mod_base = OTHER; note = 2'-O-methyladenosine-3'-phosphate
  modified_base 5: mod_base = OTHER; note = 2'-O-methyladenosine-3'-phosphate
  modified_base 6: mod_base = OTHER; note = 2'-O-methyluridine-3'-phosphate
  modified_base 7: mod_base = OTHER; note = 2'-deoxy-2'-fluorocytidine-3'-phosphate
  modified_base 8: mod_base = OTHER; note = 2'-O-methyladenosine-3'-phosphate
  modified_base 9: mod_base = OTHER; note = 2'-deoxy-2'-fluoroadenosine-3'-phosphate
  modified_base 10: mod_base = OTHER; note = 2'-deoxy-2'-fluoroguanosine-3'-phosphate
  modified_base 11: mod_base = OTHER; note = 2'-deoxy-2'-fluoroguanosine-3'-phosphate
  modified_base 12: mod_base = OTHER; note = 2'-O-methyluridine-3'-phosphate
  modified_base 13: mod_base = OTHER; note = 2'-O-methylguanosine-3'-phosphate
  modified_base 14: mod_base = OTHER; note = 2'-O-methyluridine-3'-phosphate
  modified_base 15: mod_base = OTHER; note = 2'-O-methyladenosine-3'-phosphate
  modified_base 16: mod_base = OTHER; note = 2'-O-methylcytidine-3'-phosphate
  modified_base 17: mod_base = OTHER; note = 2'-O-methyladenosine-3'-phosphate
  modified_base 18: mod_base = OTHER; note = 2'-O-methyluridine-3'-phosphate
  modified_base 19: mod_base = OTHER; note = 2'-O-methylcytidine-3'-phosphate
  modified_base 20: mod_base = OTHER; note = 2'-O-methyluridine-3'-phosphate
  modified_base 21: mod_base = OTHER; note = 2'-O-methyladenosine-3'-phosphate ((2S,4R)-1-[29-[[2-(acetylamino)-2-deoxy-beta-D-galactopyra nosyl]oxy]-14,14-bis[[3-[[3-[[5-[[2-(acetylamino)-2-deoxy-b eta-D-galactopyranosyl]oxy]-1-oxopentyl]amino]propyl]amino] -3-oxopropoxy]methyl]-1,12,19,25-tetraoxo-16-oxa-13,20,24-t riazanonacos-1-yl]-4-hydroxy-2-pyrrolidinyl)methyl ester
caaaatcaaggtgtacatcta

SEQ ID NO: 667 - RNA, 21 nt, synthetic construct
  source 1..21: mol_type = other RNA
  modified_base 1: mod_base = OTHER; note = 2'-O-methylcytidine-3'-phosphorothioate
  modified_base 2: mod_base = OTHER; note = 2'-O-methylcytidine-3'-phosphorothioate
  modified_base 3: mod_base = OTHER; note = 2'-O-methylguanosine-3'-phosphate
  modified_base 4: mod_base = OTHER; note = 2'-O-methylguanosine-3'-phosphate
  modified_base 5: mod_base = OTHER; note = 2'-O-methylguanosine-3'-phosphate
  modified_base 6: mod_base = OTHER; note = 2'-O-methyladenosine-3'-phosphate
  modified_base 7: mod_base = OTHER; note = 2'-deoxy-2'-fluoroguanosine-3'-phosphate
  modified_base 8: mod_base = OTHER; note = 2'-O-methyluridine-3'-phosphate
  modified_base 9: mod_base = OTHER; note = 2'-deoxy-2'-fluoroadenosine-3'-phosphate
  modified_base 10: mod_base = OTHER; note = 2'-deoxy-2'-fluorocytidine-3'-phosphate
  modified_base 11: mod_base = OTHER; note = 2'-deoxy-2'-fluoroadenosine-3'-phosphate
  modified_base 12: mod_base = OTHER; note = 2'-O-methyladenosine-3'-phosphate
  modified_base 13: mod_base = OTHER; note = 2'-O-methyluridine-3'-phosphate
  modified_base 14: mod_base = OTHER; note = 2'-O-methylguanosine-3'-phosphate
  modified_base 15: mod_base = OTHER; note = 2'-O-methyladenosine-3'-phosphate
  modified_base 16: mod_base = OTHER; note = 2'-O-methyladenosine-3'-phosphate
  modified_base 17: mod_base = OTHER; note = 2'-O-methylcytidine-3'-phosphate
  modified_base 18: mod_base = OTHER; note = 2'-O-methyluridine-3'-phosphate
  modified_base 19: mod_base = OTHER; note = 2'-O-methylguanosine-3'-phosphate
  modified_base 20: mod_base = OTHER; note = 2'-O-methylcytidine-3'-phosphate
  modified_base 21: mod_base = OTHER; note = 2'-O-methyladenosine-3'-phosphate ((2S,4R)-1-[29-[[2-(acetylamino)-2-deoxy-beta-D-galactopyra nosyl]oxy]-14,14-bis[[3-[[3-[[5-[[2-(acetylamino)-2-deoxy-b eta-D-galactopyranosyl]oxy]-1-oxopentyl]amino]propyl]amino] -3-oxopropoxy]methyl]-1,12,19,25-tetraoxo-16-oxa-13,20,24-t riazanonacos-1-yl]-4-hydroxy-2-pyrrolidinyl)methyl ester
ccgggagtacaatgaactgca

SEQ ID NO: 668 - RNA, 21 nt, synthetic construct
  source 1..21: mol_type = other RNA
  modified_base 1: mod_base = OTHER; note = 2'-O-methylcytidine-3'-phosphorothioate
  modified_base 2: mod_base = OTHER; note = 2'-O-methylguanosine-3'-phosphorothioate
  modified_base 3: mod_base = OTHER; note = 2'-O-methylguanosine-3'-phosphate
  modified_base 4: mod_base = OTHER; note = 2'-O-methylguanosine-3'-phosphate
  modified_base 5: mod_base = OTHER; note = 2'-O-methyladenosine-3'-phosphate
  modified_base 6: mod_base = OTHER; note = 2'-O-methylguanosine-3'-phosphate
  modified_base 7: mod_base = OTHER; note = 2'-deoxy-2'-fluorouridine-3'-phosphate
  modified_base 8: mod_base = OTHER; note = 2'-O-methyladenosine-3'-phosphate
  modified_base 9: mod_base = OTHER; note = 2'-deoxy-2'-fluorocytidine-3'-phosphate
  modified_base 10: mod_base = OTHER; note = 2'-deoxy-2'-fluoroadenosine-3'-phosphate
  modified_base 11: mod_base = OTHER; note = 2'-deoxy-2'-fluoroadenosine-3'-phosphate
  modified_base 12: mod_base = OTHER; note = 2'-O-methyluridine-3'-phosphate
  modified_base 13: mod_base = OTHER; note = 2'-O-methylguanosine-3'-phosphate
  modified_base 14: mod_base = OTHER; note = 2'-O-methyladenosine-3'-phosphate
  modified_base 15: mod_base = OTHER; note = 2'-O-methyladenosine-3'-phosphate
  modified_base 16: mod_base = OTHER; note = 2'-O-methylcytidine-3'-phosphate
  modified_base 17: mod_base = OTHER; note = 2'-O-methyluridine-3'-phosphate
  modified_base 18: mod_base = OTHER; note = 2'-O-methylguanosine-3'-phosphate
  modified_base 19: mod_base = OTHER; note = 2'-O-methylcytidine-3'-phosphate
  modified_base 20: mod_base = OTHER; note = 2'-O-methyluridine-3'-phosphate
  modified_base 21: mod_base = OTHER; note = 2'-O-methyladenosine-3'-phosphate ((2S,4R)-1-[29-[[2-(acetylamino)-2-deoxy-beta-D-galactopyra nosyl]oxy]-14,14-bis[[3-[[3-[[5-[[2-(acetylamino)-2-deoxy-b eta-D-galactopyranosyl]oxy]-1-oxopentyl]amino]propyl]amino] -3-oxopropoxy]methyl]-1,12,19,25-tetraoxo-16-oxa-13,20,24-t riazanonacos-1-yl]-4-hydroxy-2-pyrrolidinyl)methyl ester
cgggagtacaatgaactgcta

SEQ ID NO: 669 - RNA, 21 nt, synthetic construct
  source 1..21: mol_type = other RNA
  modified_base 1: mod_base = OTHER; note = 2'-O-methyladenosine-3'-phosphorothioate
  modified_base 2: mod_base = OTHER; note = 2'-O-methylcytidine-3'-phosphorothioate
  modified_base 3: mod_base = OTHER; note = 2'-O-methyladenosine-3'-phosphate
  modified_base 4: mod_base = OTHER; note = 2'-O-methyladenosine-3'-phosphate
  modified_base 5: mod_base = OTHER; note = 2'-O-methyladenosine-3'-phosphate
  modified_base 6: mod_base = OTHER; note = 2'-O-methyluridine-3'-phosphate
  modified_base 7: mod_base = OTHER; note = 2'-deoxy-2'-fluorocytidine-3'-phosphate
  modified_base 8: mod_base = OTHER; note = 2'-O-methyladenosine-3'-phosphate
  modified_base 9: mod_base = OTHER; note = 2'-deoxy-2'-fluorocytidine-3'-phosphate
  modified_base 10: mod_base = OTHER; note = 2'-deoxy-2'-fluorocytidine-3'-phosphate
  modified_base 11: mod_base = OTHER; note = 2'-deoxy-2'-fluorouridine-3'-phosphate
  modified_base 12: mod_base = OTHER; note = 2'-O-methylguanosine-3'-phosphate
  modified_base 13: mod_base = OTHER; note = 2'-O-methylcytidine-3'-phosphate
  modified_base 14: mod_base = OTHER; note = 2'-O-methyluridine-3'-phosphate
  modified_base 15: mod_base = OTHER; note = 2'-O-methylguanosine-3'-phosphate
  modified_base 16: mod_base = OTHER; note = 2'-O-methyluridine-3'-phosphate
  modified_base 17: mod_base = OTHER; note = 2'-O-methyluridine-3'-phosphate
  modified_base 18: mod_base = OTHER; note = 2'-O-methylcytidine-3'-phosphate
  modified_base 19: mod_base = OTHER; note = 2'-O-methyladenosine-3'-phosphate
  modified_base 20: mod_base = OTHER; note = 2'-O-methyladenosine-3'-phosphate
  modified_base 21: mod_base = OTHER; note = 2'-O-methyladenosine-3'-phosphate ((2S,4R)-1-[29-[[2-(acetylamino)-2-deoxy-beta-D-galactopyra nosyl]oxy]-14,14-bis[[3-[[3-[[5-[[2-(acetylamino)-2-deoxy-b eta-D-galactopyranosyl]oxy]-1-oxopentyl]amino]propyl]amino] -3-oxopropoxy]methyl]-1,12,19,25-tetraoxo-16-oxa-13,20,24-t riazanonacos-1-yl]-4-hydroxy-2-pyrrolidinyl)methyl ester
acaaatcacctgctgttcaaa

SEQ ID NO: 670 - RNA, 21 nt, synthetic construct
  source 1..21: mol_type = other RNA
  modified_base 1: mod_base = OTHER; note = 2'-O-methylcytidine-3'-phosphorothioate
  modified_base 2: mod_base = OTHER; note = 2'-O-methyluridine-3'-phosphorothioate
  modified_base 3: mod_base = OTHER; note = 2'-O-methyladenosine-3'-phosphate
  modified_base 4: mod_base = OTHER; note = 2'-O-methylcytidine-3'-phosphate
  modified_base 5: mod_base = OTHER; note = 2'-O-methylcytidine-3'-phosphate
  modified_base 6: mod_base = OTHER; note = 2'-O-methyluridine-3'-phosphate
  modified_base 7: mod_base = OTHER; note = 2'-deoxy-2'-fluoroguanosine-3'-phosphate
  modified_base 8: mod_base = OTHER; note = 2'-O-methylguanosine-3'-phosphate
  modified_base 9: mod_base = OTHER; note = 2'-deoxy-2'-fluoroadenosine-3'-phosphate
  modified_base 10: mod_base = OTHER; note = 2'-deoxy-2'-fluorocytidine-3'-phosphate
  modified_base 11: mod_base = OTHER; note = 2'-deoxy-2'-fluorouridine-3'-phosphate
  modified_base 12: mod_base = OTHER; note = 2'-O-methyluridine-3'-phosphate
  modified_base 13: mod_base = OTHER; note = 2'-O-methyladenosine-3'-phosphate
  modified_base 14: mod_base = OTHER; note = 2'-O-methylcytidine-3'-phosphate
  modified_base 15: mod_base = OTHER; note = 2'-O-methylcytidine-3'-phosphate
  modified_base 16: mod_base = OTHER; note = 2'-O-methylguanosine-3'-phosphate
  modified_base 17: mod_base = OTHER; note = 2'-O-methylguanosine-3'-phosphate
  modified_base 18: mod_base = OTHER; note = 2'-O-methylcytidine-3'-phosphate
  modified_base 19: mod_base = OTHER; note = 2'-O-methyladenosine-3'-phosphate
  modified_base 20: mod_base = OTHER; note = 2'-O-methylguanosine-3'-phosphate
  modified_base 21: mod_base = OTHER; note = 2'-O-methyladenosine-3'-phosphate ((2S,4R)-1-[29-[[2-(acetylamino)-2-deoxy-beta-D-galactopyra nosyl]oxy]-14,14-bis[[3-[[3-[[5-[[2-(acetylamino)-2-deoxy-b eta-D-galactopyranosyl]oxy]-1-oxopentyl]amino]propyl]amino] -3-oxopropoxy]methyl]-1,12,19,25-tetraoxo-16-oxa-13,20,24-t riazanonacos-1-yl]-4-hydroxy-2-pyrrolidinyl)methyl ester
ctacctggacttaccggcaga

SEQ ID NO: 671 - RNA, 21 nt, synthetic construct
  source 1..21: mol_type = other RNA
  modified_base 1: mod_base = OTHER; note = 2'-O-methyluridine-3'-phosphorothioate
  modified_base 2: mod_base = OTHER; note = 2'-O-methyladenosine-3'-phosphorothioate
  modified_base 3: mod_base = OTHER; note = 2'-O-methylcytidine-3'-phosphate
  modified_base 4: mod_base = OTHER; note = 2'-O-methylguanosine-3'-phosphate
  modified_base 5: mod_base = OTHER; note = 2'-O-methyladenosine-3'-phosphate
  modified_base 6: mod_base = OTHER; note = 2'-O-methyluridine-3'-phosphate
  modified_base 7: mod_base = OTHER; note = 2'-deoxy-2'-fluoroguanosine-3'-phosphate
  modified_base 8: mod_base = OTHER; note = 2'-O-methyluridine-3'-phosphate
  modified_base 9: mod_base = OTHER; note = 2'-deoxy-2'-fluorocytidine-3'-phosphate
  modified_base 10: mod_base = OTHER; note = 2'-deoxy-2'-fluoroadenosine-3'-phosphate
  modified_base 11: mod_base = OTHER; note = 2'-deoxy-2'-fluoroguanosine-3'-phosphate
  modified_base 12: mod_base = OTHER; note = 2'-O-methylcytidine-3'-phosphate
  modified_base 13: mod_base = OTHER; note = 2'-O-methyladenosine-3'-phosphate
  modified_base 14: mod_base = OTHER; note = 2'-O-methyluridine-3'-phosphate
  modified_base 15: mod_base = OTHER; note = 2'-O-methyluridine-3'-phosphate
  modified_base 16: mod_base = OTHER; note = 2'-O-methylcytidine-3'-phosphate
  modified_base 17: mod_base = OTHER; note = 2'-O-methylcytidine-3'-phosphate
  modified_base 18: mod_base = OTHER; note = 2'-O-methyluridine-3'-phosphate
  modified_base 19: mod_base = OTHER; note = 2'-O-methylguanosine-3'-phosphate
  modified_base 20: mod_base = OTHER; note = 2'-O-methyluridine-3'-phosphate
  modified_base 21: mod_base = OTHER; note = 2'-O-methyladenosine-3'-phosphate ((2S,4R)-1-[29-[[2-(acetylamino)-2-deoxy-beta-D-galactopyra nosyl]oxy]-14,14-bis[[3-[[3-[[5-[[2-(acetylamino)-2-deoxy-b eta-D-galactopyranosyl]oxy]-1-oxopentyl]amino]propyl]amino] -3-oxopropoxy]methyl]-1,12,19,25-tetraoxo-16-oxa-13,20,24-t riazanonacos-1-yl]-4-hydroxy-2-pyrrolidinyl)methyl ester
tacgatgtcagcattcctgta

SEQ ID NO: 672 - RNA, 21 nt, synthetic construct
  source 1..21: mol_type = other RNA
  modified_base 1: mod_base = OTHER; note = 2'-O-methyluridine-3'-phosphorothioate
  modified_base 2: mod_base = OTHER; note = 2'-O-methylcytidine-3'-phosphorothioate
  modified_base 3: mod_base = OTHER; note = 2'-O-methyladenosine-3'-phosphate
  modified_base 4: mod_base = OTHER; note = 2'-O-methylguanosine-3'-phosphate
  modified_base 5: mod_base = OTHER; note = 2'-O-methylcytidine-3'-phosphate
  modified_base 6: mod_base = OTHER; note = 2'-O-methyladenosine-3'-phosphate
  modified_base 7: mod_base = OTHER; note = 2'-deoxy-2'-fluorouridine-3'-phosphate
  modified_base 8: mod_base = OTHER; note = 2'-O-methyluridine-3'-phosphate
  modified_base 9: mod_base = OTHER; note = 2'-deoxy-2'-fluorocytidine-3'-phosphate
  modified_base 10: mod_base = OTHER; note = 2'-deoxy-2'-fluorocytidine-3'-phosphate
  modified_base 11: mod_base = OTHER; note = 2'-deoxy-2'-fluorouridine-3'-phosphate
  modified_base 12: mod_base = OTHER; note = 2'-O-methylguanosine-3'-phosphate
  modified_base 13: mod_base = OTHER; note = 2'-O-methyluridine-3'-phosphate
  modified_base 14: mod_base = OTHER; note = 2'-O-methyluridine-3'-phosphate
  modified_base 15: mod_base = OTHER; note = 2'-O-methyluridine-3'-phosphate
  modified_base 16: mod_base = OTHER; note = 2'-O-methyluridine-3'-phosphate
  modified_base 17: mod_base = OTHER; note = 2'-O-methylcytidine-3'-phosphate
  modified_base 18: mod_base = OTHER; note = 2'-O-methyladenosine-3'-phosphate
  modified_base 19: mod_base = OTHER; note = 2'-O-methylguanosine-3'-phosphate
  modified_base 20: mod_base = OTHER; note = 2'-O-methylcytidine-3'-phosphate
  modified_base 21: mod_base = OTHER; note = 2'-O-methyladenosine-3'-phosphate ((2S,4R)-1-[29-[[2-(acetylamino)-2-deoxy-beta-D-galactopyra nosyl]oxy]-14,14-bis[[3-[[3-[[5-[[2-(acetylamino)-2-deoxy-b eta-D-galactopyranosyl]oxy]-1-oxopentyl]amino]propyl]amino] -3-oxopropoxy]methyl]-1,12,19,25-tetraoxo-16-oxa-13,20,24-t riazanonacos-1-yl]-4-hydroxy-2-pyrrolidinyl)methyl ester
tcagcattcctgttttcagca

SEQ ID NO: 673 - RNA, 21 nt, synthetic construct
  source 1..21: mol_type = other RNA
  modified_base 1: mod_base = OTHER; note = 2'-O-methyladenosine-3'-phosphorothioate
  modified_base 2: mod_base = OTHER; note = 2'-O-methylcytidine-3'-phosphorothioate
  modified_base 3: mod_base = OTHER; note = 2'-O-methyluridine-3'-phosphate
  modified_base 4: mod_base = OTHER; note = 2'-O-methylguanosine-3'-phosphate
  modified_base 5: mod_base = OTHER; note = 2'-O-methyluridine-3'-phosphate
  modified_base 6: mod_base = OTHER; note = 2'-O-methylcytidine-3'-phosphate
  modified_base 7: mod_base = OTHER; note = 2'-deoxy-2'-fluorocytidine-3'-phosphate
  modified_base 8: mod_base = OTHER; note = 2'-O-methyluridine-3'-phosphate
  modified_base 9: mod_base = OTHER; note = 2'-deoxy-2'-fluorocytidine-3'-phosphate
  modified_base 10: mod_base = OTHER; note = 2'-deoxy-2'-fluorouridine-3'-phosphate
  modified_base 11: mod_base = OTHER; note = 2'-deoxy-2'-fluorocytidine-3'-phosphate
  modified_base 12: mod_base = OTHER; note = 2'-O-methyladenosine-3'-phosphate
  modified_base 13: mod_base = OTHER; note = 2'-O-methylguanosine-3'-phosphate
  modified_base 14: mod_base = OTHER; note = 2'-O-methyladenosine-3'-phosphate
  modified_base 15: mod_base = OTHER; note = 2'-O-methyluridine-3'-phosphate
  modified_base 16: mod_base = OTHER; note = 2'-O-methylguanosine-3'-phosphate
  modified_base 17: mod_base = OTHER; note = 2'-O-methylguanosine-3'-phosphate
  modified_base 18: mod_base = OTHER; note = 2'-O-methylcytidine-3'-phosphate
  modified_base 19: mod_base = OTHER; note = 2'-O-methylcytidine-3'-phosphate
  modified_base 20: mod_base = OTHER; note = 2'-O-methyladenosine-3'-phosphate
  modified_base 21: mod_base = OTHER; note = 2'-O-methyladenosine-3'-phosphate ((2S,4R)-1-[29-[[2-(acetylamino)-2-deoxy-beta-D-galactopyra nosyl]oxy]-14,14-bis[[3-[[3-[[5-[[2-(acetylamino)-2-deoxy-b eta-D-galactopyranosyl]oxy]-1-oxopentyl]amino]propyl]amino] -3-oxopropoxy]methyl]-1,12,19,25-tetraoxo-16-oxa-13,20,24-t riazanonacos-1-yl]-4-hydroxy-2-pyrrolidinyl)methyl ester
actgtcctctcagatggccaa

SEQ ID NO: 674 - RNA, 21 nt, synthetic construct
  source 1..21: mol_type = other RNA
  modified_base 1: mod_base = OTHER; note = 2'-O-methylcytidine-3'-phosphorothioate
  modified_base 2: mod_base = OTHER; note = 2'-O-methylcytidine-3'-phosphorothioate
  modified_base 3: mod_base = OTHER; note = 2'-O-methylcytidine-3'-phosphate
  modified_base 4: mod_base = OTHER; note = 2'-O-methyluridine-3'-phosphate
  modified_base 5: mod_base = OTHER; note = 2'-O-methylguanosine-3'-phosphate
  modified_base 6: mod_base = OTHER; note = 2'-O-methyladenosine-3'-phosphate
  modified_base 7: mod_base = OTHER; note = 2'-deoxy-2'-fluoroguanosine-3'-phosphate
  modified_base 8: mod_base = OTHER; note = 2'-O-methyluridine-3'-phosphate
  modified_base 9: mod_base = OTHER; note = 2'-deoxy-2'-fluoroadenosine-3'-phosphate
  modified_base 10: mod_base = OTHER; note = 2'-deoxy-2'-fluorocytidine-3'-phosphate
  modified_base 11: mod_base = OTHER; note = 2'-deoxy-2'-fluoroadenosine-3'-phosphate
  modified_base 12: mod_base = OTHER; note = 2'-O-methylguanosine-3'-phosphate
  modified_base 13: mod_base = OTHER; note = 2'-O-methyladenosine-3'-phosphate
  modified_base 14: mod_base = OTHER; note = 2'-O-methylguanosine-3'-phosphate
  modified_base 15: mod_base = OTHER; note = 2'-O-methyladenosine-3'-phosphate
  modified_base 16: mod_base = OTHER; note = 2'-O-methylguanosine-3'-phosphate
  modified_base 17: mod_base = OTHER; note = 2'-O-methylguanosine-3'-phosphate
  modified_base 18: mod_base = OTHER; note = 2'-O-methyladenosine-3'-phosphate
  modified_base 19: mod_base = OTHER; note = 2'-O-methyladenosine-3'-phosphate
  modified_base 20: mod_base = OTHER; note = 2'-O-methylcytidine-3'-phosphate
  modified_base 21: mod_base = OTHER; note = 2'-O-methyladenosine-3'-phosphate ((2S,4R)-1-[29-[[2-(acetylamino)-2-deoxy-beta-D-galactopyra nosyl]oxy]-14,14-bis[[3-[[3-[[5-[[2-(acetylamino)-2-deoxy-b eta-D-galactopyranosyl]oxy]-1-oxopentyl]amino]propyl]amino] -3-oxopropoxy]methyl]-1,12,19,25-tetraoxo-16-oxa-13,20,24-t riazanonacos-1-yl]-4-hydroxy-2-pyrrolidinyl)methyl ester
ccctgagtacagagaggaaca

SEQ ID NO: 675 - RNA, 21 nt, synthetic construct
  source 1..21: mol_type = other RNA
  modified_base 1: mod_base = OTHER; note = 2'-O-methyladenosine-3'-phosphorothioate
  modified_base 2: mod_base = OTHER; note = 2'-O-methylcytidine-3'-phosphorothioate
  modified_base 3: mod_base = OTHER; note = 2'-O-methyladenosine-3'-phosphate
  modified_base 4: mod_base = OTHER; note = 2'-O-methylguanosine-3'-phosphate
  modified_base 5: mod_base = OTHER; note = 2'-O-methyladenosine-3'-phosphate
  modified_base 6: mod_base = OTHER; note = 2'-O-methylguanosine-3'-phosphate
  modified_base 7: mod_base = OTHER; note = 2'-deoxy-2'-fluoroadenosine-3'-phosphate
  modified_base 8: mod_base = OTHER; note = 2'-O-methylguanosine-3'-phosphate
  modified_base 9: mod_base = OTHER; note = 2'-deoxy-2'-fluoroguanosine-3'-phosphate
  modified_base 10: mod_base = OTHER; note = 2'-deoxy-2'-fluoroadenosine-3'-phosphate
  modified_base 11: mod_base = OTHER; note = 2'-deoxy-2'-fluoroadenosine-3'-phosphate
  modified_base 12: mod_base = OTHER; note = 2'-O-methylcytidine-3'-phosphate
  modified_base 13: mod_base = OTHER; note = 2'-O-methyluridine-3'-phosphate
  modified_base 14: mod_base = OTHER; note = 2'-O-methyladenosine-3'-phosphate
  modified_base 15: mod_base = OTHER; note = 2'-O-methylguanosine-3'-phosphate
  modified_base 16: mod_base = OTHER; note = 2'-O-methyladenosine-3'-phosphate
  modified_base 17: mod_base = OTHER; note = 2'-O-methyladenosine-3'-phosphate
  modified_base 18: mod_base = OTHER; note = 2'-O-methylguanosine-3'-phosphate
  modified_base 19: mod_base = OTHER; note = 2'-O-methylcytidine-3'-phosphate
  modified_base 20: mod_base = OTHER; note = 2'-O-methylcytidine-3'-phosphate
  modified_base 21: mod_base = OTHER; note = 2'-O-methyladenosine-3'-phosphate ((2S,4R)-1-[29-[[2-(acetylamino)-2-deoxy-beta-D-galactopyra nosyl]oxy]-14,14-bis[[3-[[3-[[5-[[2-(acetylamino)-2-deoxy-b eta-D-galactopyranosyl]oxy]-1-oxopentyl]amino]propyl]amino] -3-oxopropoxy]methyl]-1,12,19,25-tetraoxo-16-oxa-13,20,24-t riazanonacos-1-yl]-4-hydroxy-2-pyrrolidinyl)methyl ester
acagagaggaactagaagcca

SEQ ID NO: 676 - RNA, 21 nt, synthetic construct
  source 1..21: mol_type = other RNA
  modified_base 1: mod_base = OTHER; note = 2'-O-methylguanosine-3'-phosphorothioate
  modified_base 2: mod_base = OTHER; note = 2'-O-methyluridine-3'-phosphorothioate
  modified_base 3: mod_base = OTHER; note = 2'-O-methyluridine-3'-phosphate
  modified_base 4: mod_base = OTHER; note = 2'-O-methyladenosine-3'-phosphate
  modified_base 5: mod_base = OTHER; note = 2'-O-methylguanosine-3'-phosphate
  modified_base 6: mod_base = OTHER; note = 2'-O-methyluridine-3'-phosphate
  modified_base 7: mod_base = OTHER; note = 2'-deoxy-2'-fluorocytidine-3'-phosphate
  modified_base 8: mod_base = OTHER; note = 2'-O-methyluridine-3'-phosphate
  modified_base 9: mod_base = OTHER; note = 2'-deoxy-2'-fluorouridine-3'-phosphate
  modified_base 10: mod_base = OTHER; note = 2'-deoxy-2'-fluoroguanosine-3'-phosphate
  modified_base 11: mod_base = OTHER; note = 2'-deoxy-2'-fluoroguanosine-3'-phosphate
  modified_base 12: mod_base = OTHER; note = 2'-O-methyladenosine-3'-phosphate
  modified_base 13: mod_base = OTHER; note = 2'-O-methylcytidine-3'-phosphate
  modified_base 14: mod_base = OTHER; note = 2'-O-methyladenosine-3'-phosphate
  modified_base 15: mod_base = OTHER; note = 2'-O-methyladenosine-3'-phosphate
  modified_base 16: mod_base = OTHER; note = 2'-O-methyladenosine-3'-phosphate
  modified_base 17: mod_base = OTHER; note = 2'-O-methyluridine-3'-phosphate
  modified_base 18: mod_base = OTHER; note = 2'-O-methylguanosine-3'-phosphate
  modified_base 19: mod_base = OTHER; note = 2'-O-methylcytidine-3'-phosphate
  modified_base 20: mod_base = OTHER; note = 2'-O-methyladenosine-3'-phosphate
  modified_base 21: mod_base = OTHER; note = 2'-O-methyladenosine-3'-phosphate ((2S,4R)-1-[29-[[2-(acetylamino)-2-deoxy-beta-D-galactopyra nosyl]oxy]-14,14-bis[[3-[[3-[[5-[[2-(acetylamino)-2-deoxy-b eta-D-galactopyranosyl]oxy]-1-oxopentyl]amino]propyl]amino] -3-oxopropoxy]methyl]-1,12,19,25-tetraoxo-16-oxa-13,20,24-t riazanonacos-1-yl]-4-hydroxy-2-pyrrolidinyl)methyl ester
gttagtcttggacaaatgcaa

SEQ ID NO: 677 - RNA, 21 nt, synthetic construct
  source 1..21: mol_type = other RNA
  modified_base 1: mod_base = OTHER; note = 2'-O-methyluridine-3'-phosphorothioate
  modified_base 2: mod_base = OTHER; note = 2'-O-methylguanosine-3'-phosphorothioate
  modified_base 3: mod_base = OTHER; note = 2'-O-methylguanosine-3'-phosphate
  modified_base 4: mod_base = OTHER; note = 2'-O-methyladenosine-3'-phosphate
  modified_base 5: mod_base = OTHER; note = 2'-O-methylcytidine-3'-phosphate
  modified_base 6: mod_base = OTHER; note = 2'-O-methyladenosine-3'-phosphate
  modified_base 7: mod_base = OTHER; note = 2'-deoxy-2'-fluoroadenosine-3'-phosphate
  modified_base 8: mod_base = OTHER; note = 2'-O-methyladenosine-3'-phosphate
  modified_base 9: mod_base = OTHER; note = 2'-deoxy-2'-fluorouridine-3'-phosphate
  modified_base 10: mod_base = OTHER; note = 2'-deoxy-2'-fluoroguanosine-3'-phosphate
  modified_base 11: mod_base = OTHER; note = 2'-deoxy-2'-fluorocytidine-3'-phosphate
  modified_base 12: mod_base = OTHER; note = 2'-O-methyladenosine-3'-phosphate
  modified_base 13: mod_base = OTHER; note = 2'-O-methylcytidine-3'-phosphate
  modified_base 14: mod_base = OTHER; note = 2'-O-methylcytidine-3'-phosphate
  modified_base 15: mod_base = OTHER; note = 2'-O-methyladenosine-3'-phosphate
  modified_base 16: mod_base = OTHER; note = 2'-O-methyladenosine-3'-phosphate
  modified_base 17: mod_base = OTHER; note = 2'-O-methyluridine-3'-phosphate
  modified_base 18: mod_base = OTHER; note = 2'-O-methylcytidine-3'-phosphate
  modified_base 19: mod_base = OTHER; note = 2'-O-methyluridine-3'-phosphate
  modified_base 20: mod_base = OTHER; note = 2'-O-methylcytidine-3'-phosphate
  modified_base 21: mod_base = OTHER; note = 2'-O-methyladenosine-3'-phosphate ((2S,4R)-1-[29-[[2-(acetylamino)-2-deoxy-beta-D-galactopyra nosyl]oxy]-14,14-bis[[3-[[3-[[5-[[2-(acetylamino)-2-deoxy-b eta-D-galactopyranosyl]oxy]-1-oxopentyl]amino]propyl]amino] -3-oxopropoxy]methyl]-1,12,19,25-tetraoxo-16-oxa-13,20,24-t riazanonacos-1-yl]-4-hydroxy-2-pyrrolidinyl)methyl ester
tggacaaatgcaccaatctca

SEQ ID NO: 678 - RNA, 21 nt, synthetic construct
  source 1..21: mol_type = other RNA
  modified_base 1: mod_base = OTHER; note = 2'-O-methylguanosine-3'-phosphorothioate
  modified_base 2: mod_base = OTHER; note = 2'-O-methylguanosine-3'-phosphorothioate
  modified_base 3: mod_base = OTHER; note = 2'-O-methyladenosine-3'-phosphate
  modified_base 4: mod_base = OTHER; note = 2'-O-methylcytidine-3'-phosphate
  modified_base 5: mod_base = OTHER; note = 2'-O-methyladenosine-3'-phosphate
  modified_base 6: mod_base = OTHER; note = 2'-O-methyladenosine-3'-phosphate
  modified_base 7: mod_base = OTHER; note = 2'-deoxy-2'-fluoroadenosine-3'-phosphate
  modified_base 8: mod_base = OTHER; note = 2'-O-methyluridine-3'-phosphate
  modified_base 9: mod_base = OTHER; note = 2'-deoxy-2'-fluoroguanosine-3'-phosphate
  modified_base 10: mod_base = OTHER; note = 2'-deoxy-2'-fluorocytidine-3'-phosphate
  modified_base 11: mod_base = OTHER; note = 2'-deoxy-2'-fluoroadenosine-3'-phosphate
  modified_base 12: mod_base = OTHER; note = 2'-O-methylcytidine-3'-phosphate
  modified_base 13: mod_base = OTHER; note = 2'-O-methylcytidine-3'-phosphate
  modified_base 14: mod_base = OTHER; note = 2'-O-methyladenosine-3'-phosphate
  modified_base 15: mod_base = OTHER; note = 2'-O-methyladenosine-3'-phosphate
  modified_base 16: mod_base = OTHER; note = 2'-O-methyluridine-3'-phosphate
  modified_base 17: mod_base = OTHER; note = 2'-O-methylcytidine-3'-phosphate
  modified_base 18: mod_base = OTHER; note = 2'-O-methyluridine-3'-phosphate
  modified_base 19: mod_base = OTHER; note = 2'-O-methylcytidine-3'-phosphate
  modified_base 20: mod_base = OTHER; note = 2'-O-methyluridine-3'-phosphate
  modified_base 21: mod_base = OTHER; note = 2'-O-methyladenosine-3'-phosphate ((2S,4R)-1-[29-[[2-(acetylamino)-2-deoxy-beta-D-galactopyra nosyl]oxy]-14,14-bis[[3-[[3-[[5-[[2-(acetylamino)-2-deoxy-b eta-D-galactopyranosyl]oxy]-1-oxopentyl]amino]propyl]amino] -3-oxopropoxy]methyl]-1,12,19,25-tetraoxo-16-oxa-13,20,24-t riazanonacos-1-yl]-4-hydroxy-2-pyrrolidinyl)methyl ester
ggacaaatgcaccaatctcta

SEQ ID NO: 679 - RNA, 21 nt, synthetic construct
  source 1..21: mol_type = other RNA
  modified_base 1: mod_base = OTHER; note = 2'-O-methyluridine-3'-phosphorothioate
  modified_base 2: mod_base = OTHER; note = 2'-O-methylguanosine-3'-phosphorothioate
  modified_base 3: mod_base = OTHER; note = 2'-O-methylcytidine-3'-phosphate
  modified_base 4: mod_base = OTHER; note = 2'-O-methyladenosine-3'-phosphate
  modified_base 5: mod_base = OTHER; note = 2'-O-methylguanosine-3'-phosphate
  modified_base 6: mod_base = OTHER; note = 2'-O-methylguanosine-3'-phosphate
  modified_base 7: mod_base = OTHER; note = 2'-deoxy-2'-fluoroadenosine-3'-phosphate
  modified_base 8: mod_base = OTHER; note = 2'-O-methylguanosine-3'-phosphate
  modified_base 9: mod_base = OTHER; note = 2'-deoxy-2'-fluoroguanosine-3'-phosphate
  modified_base 10: mod_base = OTHER; note = 2'-deoxy-2'-fluorocytidine-3'-phosphate
  modified_base 11: mod_base = OTHER; note = 2'-deoxy-2'-fluorouridine-3'-phosphate
  modified_base 12: mod_base = OTHER; note = 2'-O-methyladenosine-3'-phosphate
  modified_base 13: mod_base = OTHER; note = 2'-O-methylcytidine-3'-phosphate
  modified_base 14: mod_base = OTHER; note = 2'-O-methyluridine-3'-phosphate
  modified_base 15: mod_base = OTHER; note = 2'-O-methyluridine-3'-phosphate
  modified_base 16: mod_base = OTHER; note = 2'-O-methyluridine-3'-phosphate
  modified_base 17: mod_base = OTHER; note = 2'-O-methyluridine-3'-phosphate
  modified_base 18: mod_base = OTHER; note = 2'-O-methyluridine-3'-phosphate
  modified_base 19: mod_base = OTHER; note = 2'-O-methylguanosine-3'-phosphate
  modified_base 20: mod_base = OTHER; note = 2'-O-methyluridine-3'-phosphate
  modified_base 21: mod_base = OTHER; note = 2'-O-methyladenosine-3'-phosphate ((2S,4R)-1-[29-[[2-(acetylamino)-2-deoxy-beta-D-galactopyra nosyl]oxy]-14,14-bis[[3-[[3-[[5-[[2-(acetylamino)-2-deoxy-b eta-D-galactopyranosyl]oxy]-1-oxopentyl]amino]propyl]amino] -3-oxopropoxy]methyl]-1,12,19,25-tetraoxo-16-oxa-13,20,24-t riazanonacos-1-yl]-4-hydroxy-2-pyrrolidinyl)methyl ester
tgcaggaggctactttttgta

SEQ ID NO: 680 - RNA, 21 nt, synthetic construct
  source 1..21: mol_type = other RNA
  modified_base 1: mod_base = OTHER; note = 2'-O-methylguanosine-3'-phosphorothioate
  modified_base 2: mod_base = OTHER; note = 2'-O-methylcytidine-3'-phosphorothioate
  modified_base 3: mod_base = OTHER; note = 2'-O-methyladenosine-3'-phosphate
  modified_base 4: mod_base = OTHER; note = 2'-O-methylguanosine-3'-phosphate
  modified_base 5: mod_base = OTHER; note = 2'-O-methylguanosine-3'-phosphate
  modified_base 6: mod_base = OTHER; note = 2'-O-methyladenosine-3'-phosphate
  modified_base 7: mod_base = OTHER; note = 2'-deoxy-2'-fluoroguanosine-3'-phosphate
  modified_base 8: mod_base = OTHER; note = 2'-O-methylguanosine-3'-phosphate
  modified_base 9: mod_base = OTHER; note = 2'-deoxy-2'-fluorocytidine-3'-phosphate
  modified_base 10: mod_base = OTHER; note = 2'-deoxy-2'-fluorouridine-3'-phosphate
  modified_base 11: mod_base = OTHER; note = 2'-deoxy-2'-fluoroadenosine-3'-phosphate
  modified_base 12: mod_base = OTHER; note = 2'-O-methylcytidine-3'-phosphate
  modified_base 13: mod_base = OTHER; note = 2'-O-methyluridine-3'-phosphate
  modified_base 14: mod_base = OTHER; note = 2'-O-methyluridine-3'-phosphate
  modified_base 15: mod_base = OTHER; note = 2'-O-methyluridine-3'-phosphate
  modified_base 16: mod_base = OTHER; note = 2'-O-methyluridine-3'-phosphate
  modified_base 17: mod_base = OTHER; note = 2'-O-methyluridine-3'-phosphate
  modified_base 18: mod_base = OTHER; note = 2'-O-methylguanosine-3'-phosphate
  modified_base 19: mod_base = OTHER; note = 2'-O-methyluridine-3'-phosphate
  modified_base 20: mod_base = OTHER; note = 2'-O-methyladenosine-3'-phosphate
  modified_base 21: mod_base = OTHER; note = 2'-O-methyladenosine-3'-phosphate ((2S,4R)-1-[29-[[2-(acetylamino)-2-deoxy-beta-D-galactopyra nosyl]oxy]-14,14-bis[[3-[[3-[[5-[[2-(acetylamino)-2-deoxy-b eta-D-galactopyranosyl]oxy]-1-oxopentyl]amino]propyl]amino] -3-oxopropoxy]methyl]-1,12,19,25-tetraoxo-16-oxa-13,20,24-t riazanonacos-1-yl]-4-hydroxy-2-pyrrolidinyl)methyl ester
gcaggaggctactttttgtaa

SEQ ID NO: 681 - RNA, 21 nt, synthetic construct
  source 1..21: mol_type = other RNA
  modified_base 1: mod_base = OTHER; note = 2'-O-methylcytidine-3'-phosphorothioate
  modified_base 2: mod_base = OTHER; note = 2'-O-methyladenosine-3'-phosphorothioate
  modified_base 3: mod_base = OTHER; note = 2'-O-methylguanosine-3'-phosphate
  modified_base 4: mod_base = OTHER; note = 2'-O-methylguanosine-3'-phosphate
  modified_base 5: mod_base = OTHER; note = 2'-O-methyladenosine-3'-phosphate
  modified_base 6: mod_base = OTHER; note = 2'-O-methylguanosine-3'-phosphate
  modified_base 7: mod_base = OTHER; note = 2'-deoxy-2'-fluoroguanosine-3'-phosphate
  modified_base 8: mod_base = OTHER; note = 2'-O-methylcytidine-3'-phosphate
  modified_base 9: mod_base = OTHER; note = 2'-deoxy-2'-fluorouridine-3'-phosphate
  modified_base 10: mod_base = OTHER; note = 2'-deoxy-2'-fluoroadenosine-3'-phosphate
  modified_base 11: mod_base = OTHER; note = 2'-deoxy-2'-fluorocytidine-3'-phosphate
  modified_base 12: mod_base = OTHER; note = 2'-O-methyluridine-3'-phosphate
  modified_base 13: mod_base = OTHER; note = 2'-O-methyluridine-3'-phosphate
  modified_base 14: mod_base = OTHER; note = 2'-O-methyluridine-3'-phosphate
  modified_base 15: mod_base = OTHER; note = 2'-O-methyluridine-3'-phosphate
  modified_base 16: mod_base = OTHER; note = 2'-O-methyluridine-3'-phosphate
  modified_base 17: mod_base = OTHER; note = 2'-O-methylguanosine-3'-phosphate
  modified_base 18: mod_base = OTHER; note = 2'-O-methyluridine-3'-phosphate
  modified_base 19: mod_base = OTHER; note = 2'-O-methyladenosine-3'-phosphate
  modified_base 20: mod_base = OTHER; note = 2'-O-methylcytidine-3'-phosphate
  modified_base 21: mod_base = OTHER; note = 2'-O-methyladenosine-3'-phosphate ((2S,4R)-1-[29-[[2-(acetylamino)-2-deoxy-beta-D-galactopyra nosyl]oxy]-14,14-bis[[3-[[3-[[5-[[2-(acetylamino)-2-deoxy-b eta-D-galactopyranosyl]oxy]-1-oxopentyl]amino]propyl]amino] -3-oxopropoxy]methyl]-1,12,19,25-tetraoxo-16-oxa-13,20,24-t riazanonacos-1-yl]-4-hydroxy-2-pyrrolidinyl)methyl ester
caggaggctactttttgtaca

SEQ ID NO: 682 - RNA, 21 nt, synthetic construct
  source 1..21: mol_type = other RNA
  modified_base 1: mod_base = OTHER; note = 2'-O-methyladenosine-3'-phosphorothioate
  modified_base 2: mod_base = OTHER; note = 2'-O-methylguanosine-3'-phosphorothioate
  modified_base 3: mod_base = OTHER; note = 2'-O-methylguanosine-3'-phosphate
  modified_base 4: mod_base = OTHER; note = 2'-O-methyladenosine-3'-phosphate
  modified_base 5: mod_base = OTHER; note = 2'-O-methylguanosine-3'-phosphate
  modified_base 6: mod_base = OTHER; note = 2'-O-methylguanosine-3'-phosphate
  modified_base 7: mod_base = OTHER; note = 2'-deoxy-2'-fluorocytidine-3'-phosphate
  modified_base 8: mod_base = OTHER; note = 2'-O-methyluridine-3'-phosphate
  modified_base 9: mod_base = OTHER; note = 2'-deoxy-2'-fluoroadenosine-3'-phosphate
  modified_base 10: mod_base = OTHER; note = 2'-deoxy-2'-fluorocytidine-3'-phosphate
  modified_base 11: mod_base = OTHER; note = 2'-deoxy-2'-fluorouridine-3'-phosphate
  modified_base 12: mod_base = OTHER; note = 2'-O-methyluridine-3'-phosphate
  modified_base 13: mod_base = OTHER; note = 2'-O-methyluridine-3'-phosphate
  modified_base 14: mod_base = OTHER; note = 2'-O-methyluridine-3'-phosphate
  modified_base 15: mod_base = OTHER; note = 2'-O-methyluridine-3'-phosphate
  modified_base 16: mod_base = OTHER; note = 2'-O-methylguanosine-3'-phosphate
  modified_base 17: mod_base = OTHER; note = 2'-O-methyluridine-3'-phosphate
  modified_base 18: mod_base = OTHER; note = 2'-O-methyladenosine-3'-phosphate
  modified_base 19: mod_base = OTHER; note = 2'-O-methylcytidine-3'-phosphate
  modified_base 20: mod_base = OTHER; note = 2'-O-methylguanosine-3'-phosphate
  modified_base 21: mod_base = OTHER; note = 2'-O-methyladenosine-3'-phosphate ((2S,4R)-1-[29-[[2-(acetylamino)-2-deoxy-beta-D-galactopyra nosyl]oxy]-14,14-bis[[3-[[3-[[5-[[2-(acetylamino)-2-deoxy-b eta-D-galactopyranosyl]oxy]-1-oxopentyl]amino]propyl]amino] -3-oxopropoxy]methyl]-1,12,19,25-tetraoxo-16-oxa-13,20,24-t riazanonacos-1-yl]-4-hydroxy-2-pyrrolidinyl)methyl ester
aggaggctactttttgtacga

SEQ ID NO: 683 - RNA, 21 nt, synthetic construct
  source 1..21: mol_type = other RNA
  modified_base 1: mod_base = OTHER; note = 2'-O-methylguanosine-3'-phosphorothioate
  modified_base 2: mod_base = OTHER; note = 2'-O-methylguanosine-3'-phosphorothioate
  modified_base 3: mod_base = OTHER; note = 2'-O-methyladenosine-3'-phosphate
  modified_base 4: mod_base = OTHER; note = 2'-O-methylguanosine-3'-phosphate
  modified_base 5: mod_base = OTHER; note = 2'-O-methylguanosine-3'-phosphate
  modified_base 6: mod_base = OTHER; note = 2'-O-methylcytidine-3'-phosphate
  modified_base 7: mod_base = OTHER; note = 2'-deoxy-2'-fluorouridine-3'-phosphate
  modified_base 8: mod_base = OTHER; note = 2'-O-methyladenosine-3'-phosphate
  modified_base 9: mod_base = OTHER; note = 2'-deoxy-2'-fluorocytidine-3'-phosphate
  modified_base 10: mod_base = OTHER; note = 2'-deoxy-2'-fluorouridine-3'-phosphate
  modified_base 11: mod_base = OTHER; note = 2'-deoxy-2'-fluorouridine-3'-phosphate
  modified_base 12: mod_base = OTHER; note = 2'-O-methyluridine-3'-phosphate
  modified_base 13: mod_base = OTHER; note = 2'-O-methyluridine-3'-phosphate
  modified_base 14: mod_base = OTHER; note = 2'-O-methyluridine-3'-phosphate
  modified_base 15: mod_base = OTHER; note = 2'-O-methylguanosine-3'-phosphate
  modified_base 16: mod_base = OTHER; note = 2'-O-methyluridine-3'-phosphate
  modified_base 17: mod_base = OTHER; note = 2'-O-methyladenosine-3'-phosphate
  modified_base 18: mod_base = OTHER; note = 2'-O-methylcytidine-3'-phosphate
  modified_base 19: mod_base = OTHER; note = 2'-O-methylguanosine-3'-phosphate
  modified_base 20: mod_base = OTHER; note = 2'-O-methylguanosine-3'-phosphate
  modified_base 21: mod_base = OTHER; note = 2'-O-methyladenosine-3'-phosphate ((2S,4R)-1-[29-[[2-(acetylamino)-2-deoxy-beta-D-galactopyra nosyl]oxy]-14,14-bis[[3-[[3-[[5-[[2-(acetylamino)-2-deoxy-b eta-D-galactopyranosyl]oxy]-1-oxopentyl]amino]propyl]amino] -3-oxopropoxy]methyl]-1,12,19,25-tetraoxo-16-oxa-13,20,24-t riazanonacos-1-yl]-4-hydroxy-2-pyrrolidinyl)methyl ester
ggaggctactttttgtacgga

SEQ ID NO: 684 - RNA, 21 nt, synthetic construct
  source 1..21: mol_type = other RNA
  modified_base 1: mod_base = OTHER; note = 2'-O-methylguanosine-3'-phosphorothioate
  modified_base 2: mod_base = OTHER; note = 2'-O-methyladenosine-3'-phosphorothioate
  modified_base 3: mod_base = OTHER; note = 2'-O-methylguanosine-3'-phosphate
  modified_base 4: mod_base = OTHER; note = 2'-O-methylguanosine-3'-phosphate
  modified_base 5: mod_base = OTHER; note = 2'-O-methylcytidine-3'-phosphate
  modified_base 6: mod_base = OTHER; note = 2'-O-methyluridine-3'-phosphate
  modified_base 7: mod_base = OTHER; note = 2'-deoxy-2'-fluoroadenosine-3'-phosphate
  modified_base 8: mod_base = OTHER; note = 2'-O-methylcytidine-3'-phosphate
  modified_base 9: mod_base = OTHER; note = 2'-deoxy-2'-fluorouridine-3'-phosphate
  modified_base 10: mod_base = OTHER; note = 2'-deoxy-2'-fluorouridine-3'-phosphate
  modified_base 11: mod_base = OTHER; note = 2'-deoxy-2'-fluorouridine-3'-phosphate
  modified_base 12: mod_base = OTHER; note = 2'-O-methyluridine-3'-phosphate
  modified_base 13: mod_base = OTHER; note = 2'-O-methyluridine-3'-phosphate
  modified_base 14: mod_base = OTHER; note = 2'-O-methylguanosine-3'-phosphate
  modified_base 15: mod_base = OTHER; note = 2'-O-methyluridine-3'-phosphate
  modified_base 16: mod_base = OTHER; note = 2'-O-methyladenosine-3'-phosphate
  modified_base 17: mod_base = OTHER; note = 2'-O-methylcytidine-3'-phosphate
  modified_base 18: mod_base = OTHER; note = 2'-O-methylguanosine-3'-phosphate
  modified_base 19: mod_base = OTHER; note = 2'-O-methylguanosine-3'-phosphate
  modified_base 20: mod_base = OTHER; note = 2'-O-methyluridine-3'-phosphate
  modified_base 21: mod_base = OTHER; note = 2'-O-methyladenosine-3'-phosphate ((2S,4R)-1-[29-[[2-(acetylamino)-2-deoxy-beta-D-galactopyra nosyl]oxy]-14,14-bis[[3-[[3-[[5-[[2-(acetylamino)-2-deoxy-b eta-D-galactopyranosyl]oxy]-1-oxopentyl]amino]propyl]amino] -3-oxopropoxy]methyl]-1,12,19,25-tetraoxo-16-oxa-13,20,24-t riazanonacos-1-yl]-4-hydroxy-2-pyrrolidinyl)methyl ester
gaggctactttttgtacggta

SEQ ID NO: 685 - RNA, 21 nt, synthetic construct
  source 1..21: mol_type = other RNA
  modified_base 1: mod_base = OTHER; note = 2'-O-methyluridine-3'-phosphorothioate
  modified_base 2: mod_base = OTHER; note = 2'-O-methylguanosine-3'-phosphorothioate
  modified_base 3: mod_base = OTHER; note = 2'-O-methyluridine-3'-phosphate
  modified_base 4: mod_base = OTHER; note = 2'-O-methylguanosine-3'-phosphate
  modified_base 5: mod_base = OTHER; note = 2'-O-methyluridine-3'-phosphate
  modified_base 6: mod_base = OTHER; note = 2'-O-methylcytidine-3'-phosphate
  modified_base 7: mod_base = OTHER; note = 2'-deoxy-2'-fluorocytidine-3'-phosphate
  modified_base 8: mod_base = OTHER; note = 2'-O-methylcytidine-3'-phosphate
  modified_base 9: mod_base = OTHER; note = 2'-deoxy-2'-fluoroadenosine-3'-phosphate
  modified_base 10: mod_base = OTHER; note = 2'-deoxy-2'-fluoroguanosine-3'-phosphate
  modified_base 11: mod_base = OTHER; note = 2'-deoxy-2'-fluorouridine-3'-phosphate
  modified_base 12: mod_base = OTHER; note = 2'-O-methyluridine-3'-phosphate
  modified_base 13: mod_base = OTHER; note = 2'-O-methylguanosine-3'-phosphate
  modified_base 14: mod_base = OTHER; note = 2'-O-methyluridine-3'-phosphate
  modified_base 15: mod_base = OTHER; note = 2'-O-methylcytidine-3'-phosphate
  modified_base 16: mod_base = OTHER; note = 2'-O-methyladenosine-3'-phosphate
  modified_base 17: mod_base = OTHER; note = 2'-O-methyluridine-3'-phosphate
  modified_base 18: mod_base = OTHER; note = 2'-O-methyluridine-3'-phosphate
  modified_base 19: mod_base = OTHER; note = 2'-O-methylguanosine-3'-phosphate
  modified_base 20: mod_base = OTHER; note = 2'-O-methylcytidine-3'-phosphate
  modified_base 21: mod_base = OTHER; note = 2'-O-methyladenosine-3'-phosphate ((2S,4R)-1-[29-[[2-(acetylamino)-2-deoxy-beta-D-galactopyra nosyl]oxy]-14,14-bis[[3-[[3-[[5-[[2-(acetylamino)-2-deoxy-b eta-D-galactopyranosyl]oxy]-1-oxopentyl]amino]propyl]amino] -3-oxopropoxy]methyl]-1,12,19,25-tetraoxo-16-oxa-13,20,24-t riazanonacos-1-yl]-4-hydroxy-2-pyrrolidinyl)methyl ester
tgtgtcccagttgtcattgca

SEQ ID NO: 686 - RNA, 21 nt, synthetic construct
  source 1..21: mol_type = other RNA
  modified_base 1: mod_base = OTHER; note = 2'-O-methylcytidine-3'-phosphorothioate
  modified_base 2: mod_base = OTHER; note = 2'-O-methylcytidine-3'-phosphorothioate
  modified_base 3: mod_base = OTHER; note = 2'-O-methylcytidine-3'-phosphate
  modified_base 4: mod_base = OTHER; note = 2'-O-methyladenosine-3'-phosphate
  modified_base 5: mod_base = OTHER; note = 2'-O-methylguanosine-3'-phosphate
  modified_base 6: mod_base = OTHER; note = 2'-O-methyluridine-3'-phosphate
  modified_base 7: mod_base = OTHER; note = 2'-deoxy-2'-fluorouridine-3'-phosphate
  modified_base 8: mod_base = OTHER; note = 2'-O-methylguanosine-3'-phosphate
  modified_base 9: mod_base = OTHER; note = 2'-deoxy-2'-fluorouridine-3'-phosphate
  modified_base 10: mod_base = OTHER; note = 2'-deoxy-2'-fluorocytidine-3'-phosphate
  modified_base 11: mod_base = OTHER; note = 2'-deoxy-2'-fluoroadenosine-3'-phosphate
  modified_base 12: mod_base = OTHER; note = 2'-O-methyluridine-3'-phosphate
  modified_base 13: mod_base = OTHER; note = 2'-O-methyluridine-3'-phosphate
  modified_base 14: mod_base = OTHER; note = 2'-O-methylguanosine-3'-phosphate
  modified_base 15: mod_base = OTHER; note = 2'-O-methylcytidine-3'-phosphate
  modified_base 16: mod_base = OTHER; note = 2'-O-methyladenosine-3'-phosphate
  modified_base 17: mod_base = OTHER; note = 2'-O-methylguanosine-3'-phosphate
  modified_base 18: mod_base = OTHER; note = 2'-O-methyladenosine-3'-phosphate
  modified_base 19: mod_base = OTHER; note = 2'-O-methylcytidine-3'-phosphate
  modified_base 20: mod_base = OTHER; note = 2'-O-methyluridine-3'-phosphate
  modified_base 21: mod_base = OTHER; note = 2'-O-methyladenosine-3'-phosphate ((2S,4R)-1-[29-[[2-(acetylamino)-2-deoxy-beta-D-galactopyra nosyl]oxy]-14,14-bis[[3-[[3-[[5-[[2-(acetylamino)-2-deoxy-b eta-D-galactopyranosyl]oxy]-1-oxopentyl]amino]propyl]amino] -3-oxopropoxy]methyl]-1,12,19,25-tetraoxo-16-oxa-13,20,24-t riazanonacos-1-yl]-4-hydroxy-2-pyrrolidinyl)methyl ester
cccagttgtcattgcagacta

SEQ ID NO: 687 - RNA, 21 nt, synthetic construct
  source 1..21: mol_type = other RNA
  modified_base 1: mod_base = OTHER; note = 2'-O-methylcytidine-3'-phosphorothioate
  modified_base 2: mod_base = OTHER; note = 2'-O-methylcytidine-3'-phosphorothioate
  modified_base 3: mod_base = OTHER; note = 2'-O-methyladenosine-3'-phosphate
  modified_base 4: mod_base = OTHER; note = 2'-O-methylguanosine-3'-phosphate
  modified_base 5: mod_base = OTHER; note = 2'-O-methyluridine-3'-phosphate
  modified_base 6: mod_base = OTHER; note = 2'-O-methyluridine-3'-phosphate
  modified_base 7: mod_base = OTHER; note = 2'-deoxy-2'-fluoroguanosine-3'-phosphate
  modified_base 8: mod_base = OTHER; note = 2'-O-methyluridine-3'-phosphate
  modified_base 9: mod_base = OTHER; note = 2'-deoxy-2'-fluorocytidine-3'-phosphate
  modified_base 10: mod_base = OTHER; note = 2'-deoxy-2'-fluoroadenosine-3'-phosphate
  modified_base 11: mod_base = OTHER; note = 2'-deoxy-2'-fluorouridine-3'-phosphate
  modified_base 12: mod_base = OTHER; note = 2'-O-methyluridine-3'-phosphate
  modified_base 13: mod_base = OTHER; note = 2'-O-methylguanosine-3'-phosphate
  modified_base 14: mod_base = OTHER; note = 2'-O-methylcytidine-3'-phosphate
  modified_base 15: mod_base = OTHER; note = 2'-O-methyladenosine-3'-phosphate
  modified_base 16: mod_base = OTHER; note = 2'-O-methylguanosine-3'-phosphate
  modified_base 17: mod_base = OTHER; note = 2'-O-methyladenosine-3'-phosphate
  modified_base 18: mod_base = OTHER; note = 2'-O-methylcytidine-3'-phosphate
  modified_base 19: mod_base = OTHER; note = 2'-O-methyluridine-3'-phosphate
  modified_base 20: mod_base = OTHER; note = 2'-O-methylcytidine-3'-phosphate
  modified_base 21: mod_base = OTHER; note = 2'-O-methyladenosine-3'-phosphate ((2S,4R)-1-[29-[[2-(acetylamino)-2-deoxy-beta-D-galactopyra nosyl]oxy]-14,14-bis[[3-[[3-[[5-[[2-(acetylamino)-2-deoxy-b eta-D-galactopyranosyl]oxy]-1-oxopentyl]amino]propyl]amino] -3-oxopropoxy]methyl]-1,12,19,25-tetraoxo-16-oxa-13,20,24-t riazanonacos-1-yl]-4-hydroxy-2-pyrrolidinyl)methyl ester
ccagttgtcattgcagactca

SEQ ID NO: 688 - RNA, 21 nt, synthetic construct
  source 1..21: mol_type = other RNA
  modified_base 1: mod_base = OTHER; note = 2'-O-methylguanosine-3'-phosphorothioate
  modified_base 2: mod_base = OTHER; note = 2'-O-methyluridine-3'-phosphorothioate
  modified_base 3: mod_base = OTHER; note = 2'-O-methyluridine-3'-phosphate
  modified_base 4: mod_base = OTHER; note = 2'-O-methylguanosine-3'-phosphate
  modified_base 5: mod_base = OTHER; note = 2'-O-methyluridine-3'-phosphate
  modified_base 6: mod_base = OTHER; note = 2'-O-methylcytidine-3'-phosphate
  modified_base 7: mod_base = OTHER; note = 2'-deoxy-2'-fluoroadenosine-3'-phosphate
  modified_base 8: mod_base = OTHER; note = 2'-O-methyluridine-3'-phosphate
  modified_base 9: mod_base = OTHER; note = 2'-deoxy-2'-fluorouridine-3'-phosphate
  modified_base 10: mod_base = OTHER; note = 2'-deoxy-2'-fluoroguanosine-3'-phosphate
  modified_base 11: mod_base = OTHER; note = 2'-deoxy-2'-fluorocytidine-3'-phosphate
  modified_base 12: mod_base = OTHER; note = 2'-O-methyladenosine-3'-phosphate
  modified_base 13: mod_base = OTHER; note = 2'-O-methylguanosine-3'-phosphate
  modified_base 14: mod_base = OTHER; note = 2'-O-methyladenosine-3'-phosphate
  modified_base 15: mod_base = OTHER; note = 2'-O-methylcytidine-3'-phosphate
  modified_base 16: mod_base = OTHER; note = 2'-O-methyluridine-3'-phosphate
  modified_base 17: mod_base = OTHER; note = 2'-O-methylcytidine-3'-phosphate
  modified_base 18: mod_base = OTHER; note = 2'-O-methyluridine-3'-phosphate
  modified_base 19: mod_base = OTHER; note = 2'-O-methyluridine-3'-phosphate
  modified_base 20: mod_base = OTHER; note = 2'-O-methyladenosine-3'-phosphate
  modified_base 21: mod_base = OTHER; note = 2'-O-methyladenosine-3'-phosphate ((2S,4R)-1-[29-[[2-(acetylamino)-2-deoxy-beta-D-galactopyra nosyl]oxy]-14,14-bis[[3-[[3-[[5-[[2-(acetylamino)-2-deoxy-b eta-D-galactopyranosyl]oxy]-1-oxopentyl]amino]propyl]amino] -3-oxopropoxy]methyl]-1,12,19,25-tetraoxo-16-oxa-13,20,24-t riazanonacos-1-yl]-4-hydroxy-2-pyrrolidinyl)methyl ester
gttgtcattgcagactcttaa

SEQ ID NO: 689 - RNA, 21 nt, synthetic construct
  source 1..21: mol_type = other RNA
  modified_base 1: mod_base = OTHER; note = 2'-O-methylcytidine-3'-phosphorothioate
  modified_base 2: mod_base = OTHER; note = 2'-O-methyluridine-3'-phosphorothioate
  modified_base 3: mod_base = OTHER; note = 2'-O-methylcytidine-3'-phosphate
  modified_base 4: mod_base = OTHER; note = 2'-O-methyluridine-3'-phosphate
  modified_base 5: mod_base = OTHER; note = 2'-O-methyluridine-3'-phosphate
  modified_base 6: mod_base = OTHER; note = 2'-O-methyladenosine-3'-phosphate
  modified_base 7: mod_base = OTHER; note = 2'-deoxy-2'-fluorouridine-3'-phosphate
  modified_base 8: mod_base = OTHER; note = 2'-O-methyladenosine-3'-phosphate
  modified_base 9: mod_base = OTHER; note = 2'-deoxy-2'-fluorouridine-3'-phosphate
  modified_base 10: mod_base = OTHER; note = 2'-deoxy-2'-fluorouridine-3'-phosphate
  modified_base 11: mod_base = OTHER; note = 2'-deoxy-2'-fluorocytidine-3'-phosphate
  modified_base 12: mod_base = OTHER; note = 2'-O-methyluridine-3'-phosphate
  modified_base 13: mod_base = OTHER; note = 2'-O-methylguanosine-3'-phosphate
  modified_base 14: mod_base = OTHER; note = 2'-O-methylcytidine-3'-phosphate
  modified_base 15: mod_base = OTHER; note = 2'-O-methylcytidine-3'-phosphate
  modified_base 16: mod_base = OTHER; note = 2'-O-methyluridine-3'-phosphate
  modified_base 17: mod_base = OTHER; note = 2'-O-methyluridine-3'-phosphate
  modified_base 18: mod_base = OTHER; note = 2'-O-methyluridine-3'-phosphate
  modified_base 19: mod_base = OTHER; note = 2'-O-methylcytidine-3'-phosphate
  modified_base 20: mod_base = OTHER; note = 2'-O-methyluridine-3'-phosphate
  modified_base 21: mod_base = OTHER; note = 2'-O-methyladenosine-3'-phosphate ((2S,4R)-1-[29-[[2-(acetylamino)-2-deoxy-beta-D-galactopyra nosyl]oxy]-14,14-bis[[3-[[3-[[5-[[2-(acetylamino)-2-deoxy-b eta-D-galactopyranosyl]oxy]-1-oxopentyl]amino]propyl]amino] -3-oxopropoxy]methyl]-1,12,19,25-tetraoxo-16-oxa-13,20,24-t riazanonacos-1-yl]-4-hydroxy-2-pyrrolidinyl)methyl ester
ctcttatattctgcctttcta

SEQ ID NO: 690 - RNA, 21 nt, synthetic construct
  source 1..21: mol_type = other RNA
  modified_base 1: mod_base = OTHER; note = 2'-O-methyluridine-3'-phosphorothioate
  modified_base 2: mod_base = OTHER; note = 2'-O-methylcytidine-3'-phosphorothioate
  modified_base 3: mod_base = OTHER; note = 2'-O-methyluridine-3'-phosphate
  modified_base 4: mod_base = OTHER; note = 2'-O-methylguanosine-3'-phosphate
  modified_base 5: mod_base = OTHER; note = 2'-O-methylguanosine-3'-phosphate
  modified_base 6: mod_base = OTHER; note = 2'-O-methyladenosine-3'-phosphate
  modified_base 7: mod_base = OTHER; note = 2'-deoxy-2'-fluorocytidine-3'-phosphate
  modified_base 8: mod_base = OTHER; note = 2'-O-methyluridine-3'-phosphate
  modified_base 9: mod_base = OTHER; note = 2'-deoxy-2'-fluoroguanosine-3'-phosphate
  modified_base 10: mod_base = OTHER; note = 2'-deoxy-2'-fluoroguanosine-3'-phosphate
  modified_base 11: mod_base = OTHER; note = 2'-deoxy-2'-fluoroadenosine-3'-phosphate
  modified_base 12: mod_base = OTHER; note = 2'-O-methyladenosine-3'-phosphate
  modified_base 13: mod_base = OTHER; note = 2'-O-methylguanosine-3'-phosphate
  modified_base 14: mod_base = OTHER; note = 2'-O-methyladenosine-3'-phosphate
  modified_base 15: mod_base = OTHER; note = 2'-O-methylguanosine-3'-phosphate
  modified_base 16: mod_base = OTHER; note = 2'-O-methylguanosine-3'-phosphate
  modified_base 17: mod_base = OTHER; note = 2'-O-methylguanosine-3'-phosphate
  modified_base 18: mod_base = OTHER; note = 2'-O-methylcytidine-3'-phosphate
  modified_base 19: mod_base = OTHER; note = 2'-O-methyladenosine-3'-phosphate
  modified_base 20: mod_base = OTHER; note = 2'-O-methyluridine-3'-phosphate
  modified_base 21: mod_base = OTHER; note = 2'-O-methyladenosine-3'-phosphate ((2S,4R)-1-[29-[[2-(acetylamino)-2-deoxy-beta-D-galactopyra nosyl]oxy]-14,14-bis[[3-[[3-[[5-[[2-(acetylamino)-2-deoxy-b eta-D-galactopyranosyl]oxy]-1-oxopentyl]amino]propyl]amino] -3-oxopropoxy]methyl]-1,12,19,25-tetraoxo-16-oxa-13,20,24-t riazanonacos-1-yl]-4-hydroxy-2-pyrrolidinyl)methyl ester
tctggactggaagagggcata

SEQ ID NO: 691 - RNA, 21 nt, synthetic construct
  source 1..21: mol_type = other RNA
  modified_base 1: mod_base = OTHER; note = 2'-O-methylguanosine-3'-phosphorothioate
  modified_base 2: mod_base = OTHER; note = 2'-O-methyladenosine-3'-phosphorothioate
  modified_base 3: mod_base = OTHER; note = 2'-O-methyluridine-3'-phosphate
  modified_base 4: mod_base = OTHER; note = 2'-O-methylguanosine-3'-phosphate
  modified_base 5: mod_base = OTHER; note = 2'-O-methyluridine-3'-phosphate
  modified_base 6: mod_base = OTHER; note = 2'-O-methylcytidine-3'-phosphate
  modified_base 7: mod_base = OTHER; note = 2'-deoxy-2'-fluoroadenosine-3'-phosphate
  modified_base 8: mod_base = OTHER; note = 2'-O-methylguanosine-3'-phosphate
  modified_base 9: mod_base = OTHER; note = 2'-deoxy-2'-fluoroadenosine-3'-phosphate
  modified_base 10: mod_base = OTHER; note = 2'-deoxy-2'-fluorouridine-3'-phosphate
  modified_base 11: mod_base = OTHER; note = 2'-deoxy-2'-fluoroguanosine-3'-phosphate
  modified_base 12: mod_base = OTHER; note = 2'-O-methyluridine-3'-phosphate
  modified_base 13: mod_base = OTHER; note = 2'-O-methylguanosine-3'-phosphate
  modified_base 14: mod_base = OTHER; note = 2'-O-methyluridine-3'-phosphate
  modified_base 15: mod_base = OTHER; note = 2'-O-methyladenosine-3'-phosphate
  modified_base 16: mod_base = OTHER; note = 2'-O-methylcytidine-3'-phosphate
  modified_base 17: mod_base = OTHER; note = 2'-O-methyladenosine-3'-phosphate
  modified_base 18: mod_base = OTHER; note = 2'-O-methylguanosine-3'-phosphate
  modified_base 19: mod_base = OTHER; note = 2'-O-methylcytidine-3'-phosphate
  modified_base 20: mod_base = OTHER; note = 2'-O-methyladenosine-3'-phosphate
  modified_base 21: mod_base = OTHER; note = 2'-O-methyladenosine-3'-phosphate ((2S,4R)-1-[29-[[2-(acetylamino)-2-deoxy-beta-D-galactopyra nosyl]oxy]-14,14-bis[[3-[[3-[[5-[[2-(acetylamino)-2-deoxy-b eta-D-galactopyranosyl]oxy]-1-oxopentyl]amino]propyl]amino] -3-oxopropoxy]methyl]-1,12,19,25-tetraoxo-16-oxa-13,20,24-t riazanonacos-1-yl]-4-hydroxy-2-pyrrolidinyl)methyl ester
gatgtcagatgtgtacagcaa

SEQ ID NO: 692 - RNA, 21 nt, synthetic construct
  source 1..21: mol_type = other RNA
  modified_base 1: mod_base = OTHER; note = 2'-O-methyladenosine-3'-phosphorothioate
  modified_base 2: mod_base = OTHER; note = 2'-O-methylcytidine-3'-phosphorothioate
  modified_base 3: mod_base = OTHER; note = 2'-O-methylcytidine-3'-phosphate
  modified_base 4: mod_base = OTHER; note = 2'-O-methylcytidine-3'-phosphate
  modified_base 5: mod_base = OTHER; note = 2'-O-methyluridine-3'-phosphate
  modified_base 6: mod_base = OTHER; note = 2'-O-methyladenosine-3'-phosphate
  modified_base 7: mod_base = OTHER; note = 2'-deoxy-2'-fluorocytidine-3'-phosphate
  modified_base 8: mod_base = OTHER; note = 2'-O-methyladenosine-3'-phosphate
  modified_base 9: mod_base = OTHER; note = 2'-deoxy-2'-fluoroguanosine-3'-phosphate
  modified_base 10: mod_base = OTHER; note = 2'-deoxy-2'-fluoroadenosine-3'-phosphate
  modified_base 11: mod_base = OTHER; note = 2'-deoxy-2'-fluorouridine-3'-phosphate
  modified_base 12: mod_base = OTHER; note = 2'-O-methylcytidine-3'-phosphate
  modified_base 13: mod_base = OTHER; note = 2'-O-methyladenosine-3'-phosphate
  modified_base 14: mod_base = OTHER; note = 2'-O-methyluridine-3'-phosphate
  modified_base 15: mod_base = OTHER; note = 2'-O-methylcytidine-3'-phosphate
  modified_base 16: mod_base = OTHER; note = 2'-O-methyladenosine-3'-phosphate
  modified_base 17: mod_base = OTHER; note = 2'-O-methyladenosine-3'-phosphate
  modified_base 18: mod_base = OTHER; note = 2'-O-methyluridine-3'-phosphate
  modified_base 19: mod_base = OTHER; note = 2'-O-methylguanosine-3'-phosphate
  modified_base 20: mod_base = OTHER; note = 2'-O-methyladenosine-3'-phosphate
  modified_base 21: mod_base = OTHER; note = 2'-O-methyladenosine-3'-phosphate ((2S,4R)-1-[29-[[2-(acetylamino)-2-deoxy-beta-D-galactopyra nosyl]oxy]-14,14-bis[[3-[[3-[[5-[[2-(acetylamino)-2-deoxy-b eta-D-galactopyranosyl]oxy]-1-oxopentyl]amino]propyl]amino] -3-oxopropoxy]methyl]-1,12,19,25-tetraoxo-16-oxa-13,20,24-t riazanonacos-1-yl]-4-hydroxy-2-pyrrolidinyl)methyl ester
accctacagatcatcaatgaa

SEQ ID NO: 693 - RNA, 21 nt, synthetic construct
  source 1..21: mol_type = other RNA
  modified_base 1: mod_base = OTHER; note = 2'-O-methyladenosine-3'-phosphorothioate
  modified_base 2: mod_base = OTHER; note = 2'-O-methylguanosine-3'-phosphorothioate
  modified_base 3: mod_base = OTHER; note = 2'-O-methyladenosine-3'-phosphate
  modified_base 4: mod_base = OTHER; note = 2'-O-methyluridine-3'-phosphate
  modified_base 5: mod_base = OTHER; note = 2'-O-methylcytidine-3'-phosphate
  modified_base 6: mod_base = OTHER; note = 2'-O-methyladenosine-3'-phosphate
  modified_base 7: mod_base = OTHER; note = 2'-deoxy-2'-fluorouridine-3'-phosphate
  modified_base 8: mod_base = OTHER; note = 2'-O-methylcytidine-3'-phosphate
  modified_base 9: mod_base = OTHER; note = 2'-deoxy-2'-fluoroadenosine-3'-phosphate
  modified_base 10: mod_base = OTHER; note = 2'-deoxy-2'-fluoroadenosine-3'-phosphate
  modified_base 11: mod_base = OTHER; note = 2'-deoxy-2'-fluorouridine-3'-phosphate
  modified_base 12: mod_base = OTHER; note = 2'-O-methylguanosine-3'-phosphate
  modified_base 13: mod_base = OTHER; note = 2'-O-methyladenosine-3'-phosphate
  modified_base 14: mod_base = OTHER; note = 2'-O-methylcytidine-3'-phosphate
  modified_base 15: mod_base = OTHER; note = 2'-O-methyladenosine-3'-phosphate
  modified_base 16: mod_base = OTHER; note = 2'-O-methylguanosine-3'-phosphate
  modified_base 17: mod_base = OTHER; note = 2'-O-methylguanosine-3'-phosphate
  modified_base 18: mod_base = OTHER; note = 2'-O-methyladenosine-3'-phosphate
  modified_base 19: mod_base = OTHER; note = 2'-O-methyluridine-3'-phosphate
  modified_base 20: mod_base = OTHER; note = 2'-O-methylcytidine-3'-phosphate
  modified_base 21: mod_base = OTHER; note = 2'-O-methyladenosine-3'-phosphate ((2S,4R)-1-[29-[[2-(acetylamino)-2-deoxy-beta-D-galactopyra nosyl]oxy]-14,14-bis[[3-[[3-[[5-[[2-(acetylamino)-2-deoxy-b eta-D-galactopyranosyl]oxy]-1-oxopentyl]amino]propyl]amino] -3-oxopropoxy]methyl]-1,12,19,25-tetraoxo-16-oxa-13,20,24-t riazanonacos-1-yl]-4-hydroxy-2-pyrrolidinyl)methyl ester
agatcatcaatgacaggatca

SEQ ID NO: 694 - RNA, 21 nt, synthetic construct
  source 1..21: mol_type = other RNA
  modified_base 1: mod_base = OTHER; note = 2'-O-methyluridine-3'-phosphorothioate
  modified_base 2: mod_base = OTHER; note = 2'-O-methylcytidine-3'-phosphorothioate
  modified_base 3: mod_base = OTHER; note = 2'-O-methyladenosine-3'-phosphate
  modified_base 4: mod_base = OTHER; note = 2'-O-methyladenosine-3'-phosphate
  modified_base 5: mod_base = OTHER; note = 2'-O-methyluridine-3'-phosphate
  modified_base 6: mod_base = OTHER; note = 2'-O-methylguanosine-3'-phosphate
  modified_base 7: mod_base = OTHER; note = 2'-deoxy-2'-fluoroadenosine-3'-phosphate
  modified_base 8: mod_base = OTHER; note = 2'-O-methylcytidine-3'-phosphate
  modified_base 9: mod_base = OTHER; note = 2'-deoxy-2'-fluoroadenosine-3'-phosphate
  modified_base 10: mod_base = OTHER; note = 2'-deoxy-2'-fluoroguanosine-3'-phosphate
  modified_base 11: mod_base = OTHER; note = 2'-deoxy-2'-fluoroguanosine-3'-phosphate
  modified_base 12: mod_base = OTHER; note = 2'-O-methyladenosine-3'-phosphate
  modified_base 13: mod_base = OTHER; note = 2'-O-methyluridine-3'-phosphate
  modified_base 14: mod_base = OTHER; note = 2'-O-methylcytidine-3'-phosphate
  modified_base 15: mod_base = OTHER; note = 2'-O-methyluridine-3'-phosphate
  modified_base 16: mod_base = OTHER; note = 2'-O-methyladenosine-3'-phosphate
  modified_base 17: mod_base = OTHER; note = 2'-O-methyluridine-3'-phosphate
  modified_base 18: mod_base = OTHER; note = 2'-O-methylcytidine-3'-phosphate
  modified_base 19: mod_base = OTHER; note = 2'-O-methylcytidine-3'-phosphate
  modified_base 20: mod_base = OTHER; note = 2'-O-methyladenosine-3'-phosphate
  modified_base 21: mod_base = OTHER; note = 2'-O-methyladenosine-3'-phosphate ((2S,4R)-1-[29-[[2-(acetylamino)-2-deoxy-beta-D-galactopyra nosyl]oxy]-14,14-bis[[3-[[3-[[5-[[2-(acetylamino)-2-deoxy-b eta-D-galactopyranosyl]oxy]-1-oxopentyl]amino]propyl]amino] -3-oxopropoxy]methyl]-1,12,19,25-tetraoxo-16-oxa-13,20,24-t riazanonacos-1-yl]-4-hydroxy-2-pyrrolidinyl)methyl ester
tcaatgacaggatctatccaa

SEQ ID NO: 695 - RNA, 21 nt, synthetic construct
  source 1..21: mol_type = other RNA
  modified_base 1: mod_base = OTHER; note = 2'-O-methylcytidine-3'-phosphorothioate
  modified_base 2: mod_base = OTHER; note = 2'-O-methyladenosine-3'-phosphorothioate
  modified_base 3: mod_base = OTHER; note = 2'-O-methyladenosine-3'-phosphate
  modified_base 4: mod_base = OTHER; note = 2'-O-methyluridine-3'-phosphate
  modified_base 5: mod_base = OTHER; note = 2'-O-methylguanosine-3'-phosphate
  modified_base 6: mod_base = OTHER; note = 2'-O-methyladenosine-3'-phosphate
  modified_base 7: mod_base = OTHER; note = 2'-deoxy-2'-fluorocytidine-3'-phosphate
  modified_base 8: mod_base = OTHER; note = 2'-O-methyladenosine-3'-phosphate
  modified_base 9: mod_base = OTHER; note = 2'-deoxy-2'-fluoroguanosine-3'-phosphate
  modified_base 10: mod_base = OTHER; note = 2'-deoxy-2'-fluoroguanosine-3'-phosphate
  modified_base 11: mod_base = OTHER; note = 2'-deoxy-2'-fluoroadenosine-3'-phosphate
  modified_base 12: mod_base = OTHER; note = 2'-O-methyluridine-3'-phosphate
  modified_base 13: mod_base = OTHER; note = 2'-O-methylcytidine-3'-phosphate
  modified_base 14: mod_base = OTHER; note = 2'-O-methyluridine-3'-phosphate
  modified_base 15: mod_base = OTHER; note = 2'-O-methyladenosine-3'-phosphate
  modified_base 16: mod_base = OTHER; note = 2'-O-methyluridine-3'-phosphate
  modified_base 17: mod_base = OTHER; note = 2'-O-methylcytidine-3'-phosphate
  modified_base 18: mod_base = OTHER; note = 2'-O-methylcytidine-3'-phosphate
  modified_base 19: mod_base = OTHER; note = 2'-O-methyladenosine-3'-phosphate
  modified_base 20: mod_base = OTHER; note = 2'-O-methyluridine-3'-phosphate
  modified_base 21: mod_base = OTHER; note = 2'-O-methyladenosine-3'-phosphate ((2S,4R)-1-[29-[[2-(acetylamino)-2-deoxy-beta-D-galactopyra nosyl]oxy]-14,14-bis[[3-[[3-[[5-[[2-(acetylamino)-2-deoxy-b eta-D-galactopyranosyl]oxy]-1-oxopentyl]amino]propyl]amino] -3-oxopropoxy]methyl]-1,12,19,25-tetraoxo-16-oxa-13,20,24-t riazanonacos-1-yl]-4-hydroxy-2-pyrrolidinyl)methyl ester
caatgacaggatctatccata

SEQ ID NO: 696 - RNA, 21 nt, synthetic construct
  source 1..21: mol_type = other RNA
  modified_base 1: mod_base = OTHER; note = 2'-O-methyladenosine-3'-phosphorothioate
  modified_base 2: mod_base = OTHER; note = 2'-O-methyladenosine-3'-phosphorothioate
  modified_base 3: mod_base = OTHER; note = 2'-O-methyluridine-3'-phosphate
  modified_base 4: mod_base = OTHER; note = 2'-O-methylguanosine-3'-phosphate
  modified_base 5: mod_base = OTHER; note = 2'-O-methyladenosine-3'-phosphate
  modified_base 6: mod_base = OTHER; note = 2'-O-methylcytidine-3'-phosphate
  modified_base 7: mod_base = OTHER; note = 2'-deoxy-2'-fluoroadenosine-3'-phosphate
  modified_base 8: mod_base = OTHER; note = 2'-O-methylguanosine-3'-phosphate
  modified_base 9: mod_base = OTHER; note = 2'-deoxy-2'-fluoroguanosine-3'-phosphate
  modified_base 10: mod_base = OTHER; note = 2'-deoxy-2'-fluoroadenosine-3'-phosphate
  modified_base 11: mod_base = OTHER; note = 2'-deoxy-2'-fluorouridine-3'-phosphate
  modified_base 12: mod_base = OTHER; note = 2'-O-methylcytidine-3'-phosphate
  modified_base 13: mod_base = OTHER; note = 2'-O-methyluridine-3'-phosphate
  modified_base 14: mod_base = OTHER; note = 2'-O-methyladenosine-3'-phosphate
  modified_base 15: mod_base = OTHER; note = 2'-O-methyluridine-3'-phosphate
  modified_base 16: mod_base = OTHER; note = 2'-O-methylcytidine-3'-phosphate
  modified_base 17: mod_base = OTHER; note = 2'-O-methylcytidine-3'-phosphate
  modified_base 18: mod_base = OTHER; note = 2'-O-methyladenosine-3'-phosphate
  modified_base 19: mod_base = OTHER; note = 2'-O-methyluridine-3'-phosphate
  modified_base 20: mod_base = OTHER; note = 2'-O-methyladenosine-3'-phosphate
  modified_base 21: mod_base = OTHER; note = 2'-O-methyladenosine-3'-phosphate ((2S,4R)-1-[29-[[2-(acetylamino)-2-deoxy-beta-D-galactopyra nosyl]oxy]-14,14-bis[[3-[[3-[[5-[[2-(acetylamino)-2-deoxy-b eta-D-galactopyranosyl]oxy]-1-oxopentyl]amino]propyl]amino] -3-oxopropoxy]methyl]-1,12,19,25-tetraoxo-16-oxa-13,20,24-t riazanonacos-1-yl]-4-hydroxy-2-pyrrolidinyl)methyl ester
aatgacaggatctatccataa

SEQ ID NO: 697 - RNA, 21 nt, synthetic construct
  source 1..21: mol_type = other RNA
  modified_base 1: mod_base = OTHER; note = 2'-O-methyladenosine-3'-phosphorothioate
  modified_base 2: mod_base = OTHER; note = 2'-O-methyluridine-3'-phosphorothioate
  modified_base 3: mod_base = OTHER; note = 2'-O-methylguanosine-3'-phosphate
  modified_base 4: mod_base = OTHER; note = 2'-O-methyladenosine-3'-phosphate
  modified_base 5: mod_base = OTHER; note = 2'-O-methylcytidine-3'-phosphate
  modified_base 6: mod_base = OTHER; note = 2'-O-methyladenosine-3'-phosphate
  modified_base 7: mod_base = OTHER; note = 2'-deoxy-2'-fluoroguanosine-3'-phosphate
  modified_base 8: mod_base = OTHER; note = 2'-O-methylguanosine-3'-phosphate
  modified_base 9: mod_base = OTHER; note = 2'-deoxy-2'-fluoroadenosine-3'-phosphate
  modified_base 10: mod_base = OTHER; note = 2'-deoxy-2'-fluorouridine-3'-phosphate
  modified_base 11: mod_base = OTHER; note = 2'-deoxy-2'-fluorocytidine-3'-phosphate
  modified_base 12: mod_base = OTHER; note = 2'-O-methyluridine-3'-phosphate
  modified_base 13: mod_base = OTHER; note = 2'-O-methyladenosine-3'-phosphate
  modified_base 14: mod_base = OTHER; note = 2'-O-methyluridine-3'-phosphate
  modified_base 15: mod_base = OTHER; note = 2'-O-methylcytidine-3'-phosphate
  modified_base 16: mod_base = OTHER; note = 2'-O-methylcytidine-3'-phosphate
  modified_base 17: mod_base = OTHER; note = 2'-O-methyladenosine-3'-phosphate
  modified_base 18: mod_base = OTHER; note = 2'-O-methyluridine-3'-phosphate
  modified_base 19: mod_base = OTHER; note = 2'-O-methyladenosine-3'-phosphate
  modified_base 20: mod_base = OTHER; note = 2'-O-methyluridine-3'-phosphate
  modified_base 21: mod_base = OTHER; note = 2'-O-methyladenosine-3'-phosphate ((2S,4R)-1-[29-[[2-(acetylamino)-2-deoxy-beta-D-galactopyra nosyl]oxy]-14,14-bis[[3-[[3-[[5-[[2-(acetylamino)-2-deoxy-b eta-D-galactopyranosyl]oxy]-1-oxopentyl]amino]propyl]amino] -3-oxopropoxy]methyl]-1,12,19,25-tetraoxo-16-oxa-13,20,24-t riazanonacos-1-yl]-4-hydroxy-2-pyrrolidinyl)methyl ester
atgacaggatctatccatata

SEQ ID NO: 698 - RNA, 21 nt, synthetic construct
  source 1..21: mol_type = other RNA
  modified_base 1: mod_base = OTHER; note = 2'-O-methylguanosine-3'-phosphorothioate
  modified_base 2: mod_base = OTHER; note = 2'-O-methyladenosine-3'-phosphorothioate
  modified_base 3: mod_base = OTHER; note = 2'-O-methylcytidine-3'-phosphate
  modified_base 4: mod_base = OTHER; note = 2'-O-methyladenosine-3'-phosphate
  modified_base 5: mod_base = OTHER; note = 2'-O-methylguanosine-3'-phosphate
  modified_base 6: mod_base = OTHER; note = 2'-O-methylguanosine-3'-phosphate
  modified_base 7: mod_base = OTHER; note = 2'-deoxy-2'-fluoroadenosine-3'-phosphate
  modified_base 8: mod_base = OTHER; note = 2'-O-methyluridine-3'-phosphate
  modified_base 9: mod_base = OTHER; note = 2'-deoxy-2'-fluorocytidine-3'-phosphate
  modified_base 10: mod_base = OTHER; note = 2'-deoxy-2'-fluorouridine-3'-phosphate
  modified_base 11: mod_base = OTHER; note = 2'-deoxy-2'-fluoroadenosine-3'-phosphate
  modified_base 12: mod_base = OTHER; note = 2'-O-methyluridine-3'-phosphate
  modified_base 13: mod_base = OTHER; note = 2'-O-methylcytidine-3'-phosphate
  modified_base 14: mod_base = OTHER; note = 2'-O-methylcytidine-3'-phosphate
  modified_base 15: mod_base = OTHER; note = 2'-O-methyladenosine-3'-phosphate
  modified_base 16: mod_base = OTHER; note = 2'-O-methyluridine-3'-phosphate
  modified_base 17: mod_base = OTHER; note = 2'-O-methyladenosine-3'-phosphate
  modified_base 18: mod_base = OTHER; note = 2'-O-methyluridine-3'-phosphate
  modified_base 19: mod_base = OTHER; note = 2'-O-methylguanosine-3'-phosphate
  modified_base 20: mod_base = OTHER; note = 2'-O-methylcytidine-3'-phosphate
  modified_base 21: mod_base = OTHER; note = 2'-O-methyladenosine-3'-phosphate ((2S,4R)-1-[29-[[2-(acetylamino)-2-deoxy-beta-D-galactopyra nosyl]oxy]-14,14-bis[[3-[[3-[[5-[[2-(acetylamino)-2-deoxy-b eta-D-galactopyranosyl]oxy]-1-oxopentyl]amino]propyl]amino] -3-oxopropoxy]methyl]-1,12,19,25-tetraoxo-16-oxa-13,20,24-t riazanonacos-1-yl]-4-hydroxy-2-pyrrolidinyl)methyl ester
gacaggatctatccatatgca

SEQ ID NO: 699 - RNA, 21 nt, synthetic construct
  source 1..21: mol_type = other RNA
  modified_base 1: mod_base = OTHER; note = 2'-O-methyladenosine-3'-phosphorothioate
  modified_base 2: mod_base = OTHER; note = 2'-O-methylcytidine-3'-phosphorothioate
  modified_base 3: mod_base = OTHER; note = 2'-O-methyladenosine-3'-phosphate
  modified_base 4: mod_base = OTHER; note = 2'-O-methylguanosine-3'-phosphate
  modified_base 5: mod_base = OTHER; note = 2'-O-methylguanosine-3'-phosphate
  modified_base 6: mod_base = OTHER; note = 2'-O-methyladenosine-3'-phosphate
  modified_base 7: mod_base = OTHER; note = 2'-deoxy-2'-fluorouridine-3'-phosphate
  modified_base 8: mod_base = OTHER; note = 2'-O-methylcytidine-3'-phosphate
  modified_base 9: mod_base = OTHER; note = 2'-deoxy-2'-fluorouridine-3'-phosphate
  modified_base 10: mod_base = OTHER; note = 2'-deoxy-2'-fluoroadenosine-3'-phosphate
  modified_base 11: mod_base = OTHER; note = 2'-deoxy-2'-fluorouridine-3'-phosphate
  modified_base 12: mod_base = OTHER; note = 2'-O-methylcytidine-3'-phosphate
  modified_base 13: mod_base = OTHER; note = 2'-O-methylcytidine-3'-phosphate
  modified_base 14: mod_base = OTHER; note = 2'-O-methyladenosine-3'-phosphate
  modified_base 15: mod_base = OTHER; note = 2'-O-methyluridine-3'-phosphate
  modified_base 16: mod_base = OTHER; note = 2'-O-methyladenosine-3'-phosphate
  modified_base 17: mod_base = OTHER; note = 2'-O-methyluridine-3'-phosphate
  modified_base 18: mod_base = OTHER; note = 2'-O-methylguanosine-3'-phosphate
  modified_base 19: mod_base = OTHER; note = 2'-O-methylcytidine-3'-phosphate
  modified_base 20: mod_base = OTHER; note = 2'-O-methyladenosine-3'-phosphate
  modified_base 21: mod_base = OTHER; note = 2'-O-methyladenosine-3'-phosphate ((2S,4R)-1-[29-[[2-(acetylamino)-2-deoxy-beta-D-galactopyra nosyl]oxy]-14,14-bis[[3-[[3-[[5-[[2-(acetylamino)-2-deoxy-b eta-D-galactopyranosyl]oxy]-1-oxopentyl]amino]propyl]amino] -3-oxopropoxy]methyl]-1,12,19,25-tetraoxo-16-oxa-13,20,24-t riazanonacos-1-yl]-4-hydroxy-2-pyrrolidinyl)methyl ester
acaggatctatccatatgcaa

SEQ ID NO: 700 - RNA, 21 nt, synthetic construct
  source 1..21: mol_type = other RNA
  modified_base 1: mod_base = OTHER; note = 2'-O-methyluridine-3'-phosphorothioate
  modified_base 2: mod_base = OTHER; note = 2'-O-methylcytidine-3'-phosphorothioate
  modified_base 3: mod_base = OTHER; note = 2'-O-methyluridine-3'-phosphate
  modified_base 4: mod_base = OTHER; note = 2'-O-methylcytidine-3'-phosphate
  modified_base 5: mod_base = OTHER; note = 2'-O-methylcytidine-3'-phosphate
  modified_base 6: mod_base = OTHER; note = 2'-O-methyluridine-3'-phosphate
  modified_base 7: mod_base = OTHER; note = 2'-deoxy-2'-fluoroadenosine-3'-phosphate
  modified_base 8: mod_base = OTHER; note = 2'-O-methyluridine-3'-phosphate
  modified_base 9: mod_base = OTHER; note = 2'-deoxy-2'-fluoroguanosine-3'-phosphate
  modified_base 10: mod_base = OTHER; note = 2'-deoxy-2'-fluoroadenosine-3'-phosphate
  modified_base 11: mod_base = OTHER; note = 2'-deoxy-2'-fluoroadenosine-3'-phosphate
  modified_base 12: mod_base = OTHER; note = 2'-O-methylguanosine-3'-phosphate
  modified_base 13: mod_base = OTHER; note = 2'-O-methyladenosine-3'-phosphate
  modified_base 14: mod_base = OTHER; note = 2'-O-methylguanosine-3'-phosphate
  modified_base 15: mod_base = OTHER; note = 2'-O-methyluridine-3'-phosphate
  modified_base 16: mod_base = OTHER; note = 2'-O-methylguanosine-3'-phosphate
  modified_base 17: mod_base = OTHER; note = 2'-O-methylguanosine-3'-phosphate
  modified_base 18: mod_base = OTHER; note = 2'-O-methyladenosine-3'-phosphate
  modified_base 19: mod_base = OTHER; note = 2'-O-methyladenosine-3'-phosphate
  modified_base 20: mod_base = OTHER; note = 2'-O-methyluridine-3'-phosphate
  modified_base 21: mod_base = OTHER; note = 2'-O-methyladenosine-3'-phosphate ((2S,4R)-1-[29-[[2-(acetylamino)-2-deoxy-beta-D-galactopyra nosyl]oxy]-14,14-bis[[3-[[3-[[5-[[2-(acetylamino)-2-deoxy-b eta-D-galactopyranosyl]oxy]-1-oxopentyl]amino]propyl]amino] -3-oxopropoxy]methyl]-1,12,19,25-tetraoxo-16-oxa-13,20,24-t riazanonacos-1-yl]-4-hydroxy-2-pyrrolidinyl)methyl ester
tctcctatgaagagtggaata

SEQ ID NO: 701 - RNA, 21 nt, synthetic construct
  source 1..21: mol_type = other RNA
  modified_base 1: mod_base = OTHER; note = 2'-O-methylcytidine-3'-phosphorothioate
  modified_base 2: mod_base = OTHER; note = 2'-O-methyluridine-3'-phosphorothioate
  modified_base 3: mod_base = OTHER; note = 2'-O-methylcytidine-3'-phosphate
  modified_base 4: mod_base = OTHER; note = 2'-O-methylcytidine-3'-phosphate
  modified_base 5: mod_base = OTHER; note = 2'-O-methyluridine-3'-phosphate
  modified_base 6: mod_base = OTHER; note = 2'-O-methyladenosine-3'-phosphate
  modified_base 7: mod_base = OTHER; note = 2'-deoxy-2'-fluorouridine-3'-phosphate
  modified_base 8: mod_base = OTHER; note = 2'-O-methylguanosine-3'-phosphate
  modified_base 9: mod_base = OTHER; note = 2'-deoxy-2'-fluoroadenosine-3'-phosphate
  modified_base 10: mod_base = OTHER; note = 2'-deoxy-2'-fluoroadenosine-3'-phosphate
  modified_base 11: mod_base = OTHER; note = 2'-deoxy-2'-fluoroguanosine-3'-phosphate
  modified_base 12: mod_base = OTHER; note = 2'-O-methyladenosine-3'-phosphate
  modified_base 13: mod_base = OTHER; note = 2'-O-methylguanosine-3'-phosphate
  modified_base 14: mod_base = OTHER; note = 2'-O-methyluridine-3'-phosphate
  modified_base 15: mod_base = OTHER; note = 2'-O-methylguanosine-3'-phosphate
  modified_base 16: mod_base = OTHER; note = 2'-O-methylguanosine-3'-phosphate
  modified_base 17: mod_base = OTHER; note = 2'-O-methyladenosine-3'-phosphate
  modified_base 18: mod_base = OTHER; note = 2'-O-methyladenosine-3'-phosphate
  modified_base 19: mod_base = OTHER; note = 2'-O-methyluridine-3'-phosphate
  modified_base 20: mod_base = OTHER; note = 2'-O-methylguanosine-3'-phosphate
  modified_base 21: mod_base = OTHER; note = 2'-O-methyladenosine-3'-phosphate ((2S,4R)-1-[29-[[2-(acetylamino)-2-deoxy-beta-D-galactopyra nosyl]oxy]-14,14-bis[[3-[[3-[[5-[[2-(acetylamino)-2-deoxy-b eta-D-galactopyranosyl]oxy]-1-oxopentyl]amino]propyl]amino] -3-oxopropoxy]methyl]-1,12,19,25-tetraoxo-16-oxa-13,20,24-t riazanonacos-1-yl]-4-hydroxy-2-pyrrolidinyl)methyl ester
ctcctatgaagagtggaatga

SEQ ID NO: 702 - RNA, 21 nt, synthetic construct
  source 1..21: mol_type = other RNA
  modified_base 1: mod_base = OTHER; note = 2'-O-methylcytidine-3'-phosphorothioate
  modified_base 2: mod_base = OTHER; note = 2'-O-methylcytidine-3'-phosphorothioate
  modified_base 3: mod_base = OTHER; note = 2'-O-methyluridine-3'-phosphate
  modified_base 4: mod_base = OTHER; note = 2'-O-methyladenosine-3'-phosphate
  modified_base 5: mod_base = OTHER; note = 2'-O-methyluridine-3'-phosphate
  modified_base 6: mod_base = OTHER; note = 2'-O-methylguanosine-3'-phosphate
  modified_base 7: mod_base = OTHER; note = 2'-deoxy-2'-fluoroadenosine-3'-phosphate
  modified_base 8: mod_base = OTHER; note = 2'-O-methyladenosine-3'-phosphate
  modified_base 9: mod_base = OTHER; note = 2'-deoxy-2'-fluoroguanosine-3'-phosphate
  modified_base 10: mod_base = OTHER; note = 2'-deoxy-2'-fluoroadenosine-3'-phosphate
  modified_base 11: mod_base = OTHER; note = 2'-deoxy-2'-fluoroguanosine-3'-phosphate
  modified_base 12: mod_base = OTHER; note = 2'-O-methyluridine-3'-phosphate
  modified_base 13: mod_base = OTHER; note = 2'-O-methylguanosine-3'-phosphate
  modified_base 14: mod_base = OTHER; note = 2'-O-methylguanosine-3'-phosphate
  modified_base 15: mod_base = OTHER; note = 2'-O-methyladenosine-3'-phosphate
  modified_base 16: mod_base = OTHER; note = 2'-O-methyladenosine-3'-phosphate
  modified_base 17: mod_base = OTHER; note = 2'-O-methyluridine-3'-phosphate
  modified_base 18: mod_base = OTHER; note = 2'-O-methylguanosine-3'-phosphate
  modified_base 19: mod_base = OTHER; note = 2'-O-methyladenosine-3'-phosphate
  modified_base 20: mod_base = OTHER; note = 2'-O-methylcytidine-3'-phosphate
  modified_base 21: mod_base = OTHER; note = 2'-O-methyladenosine-3'-phosphate ((2S,4R)-1-[29-[[2-(acetylamino)-2-deoxy-beta-D-galactopyra nosyl]oxy]-14,14-bis[[3-[[3-[[5-[[2-(acetylamino)-2-deoxy-b eta-D-galactopyranosyl]oxy]-1-oxopentyl]amino]propyl]amino] -3-oxopropoxy]methyl]-1,12,19,25-tetraoxo-16-oxa-13,20,24-t riazanonacos-1-yl]-4-hydroxy-2-pyrrolidinyl)methyl ester
cctatgaagagtggaatgaca

SEQ ID NO: 703 - RNA, 21 nt, synthetic construct
  source 1..21: mol_type = other RNA
  modified_base 1: mod_base = OTHER; note = 2'-O-methyladenosine-3'-phosphorothioate
  modified_base 2: mod_base = OTHER; note = 2'-O-methylguanosine-3'-phosphorothioate
  modified_base 3: mod_base = OTHER; note = 2'-O-methyladenosine-3'-phosphate
  modified_base 4: mod_base = OTHER; note = 2'-O-methylguanosine-3'-phosphate
  modified_base 5: mod_base = OTHER; note = 2'-O-methyluridine-3'-phosphate
  modified_base 6: mod_base = OTHER; note = 2'-O-methylguanosine-3'-phosphate
  modified_base 7: mod_base = OTHER; note = 2'-deoxy-2'-fluoroguanosine-3'-phosphate
  modified_base 8: mod_base = OTHER; note = 2'-O-methyladenosine-3'-phosphate
  modified_base 9: mod_base = OTHER; note = 2'-deoxy-2'-fluoroadenosine-3'-phosphate
  modified_base 10: mod_base = OTHER; note = 2'-deoxy-2'-fluorouridine-3'-phosphate
  modified_base 11: mod_base = OTHER; note = 2'-deoxy-2'-fluoroguanosine-3'-phosphate
  modified_base 12: mod_base = OTHER; note = 2'-O-methyladenosine-3'-phosphate
  modified_base 13: mod_base = OTHER; note = 2'-O-methylcytidine-3'-phosphate
  modified_base 14: mod_base = OTHER; note = 2'-O-methylcytidine-3'-phosphate
  modified_base 15: mod_base = OTHER; note = 2'-O-methylcytidine-3'-phosphate
  modified_base 16: mod_base = OTHER; note = 2'-O-methyluridine-3'-phosphate
  modified_base 17: mod_base = OTHER; note = 2'-O-methylcytidine-3'-phosphate
  modified_base 18: mod_base = OTHER; note = 2'-O-methylcytidine-3'-phosphate
  modified_base 19: mod_base = OTHER; note = 2'-O-methyluridine-3'-phosphate
  modified_base 20: mod_base = OTHER; note = 2'-O-methylguanosine-3'-phosphate
  modified_base 21: mod_base = OTHER; note = 2'-O-methyladenosine-3'-phosphate ((2S,4R)-1-[29-[[2-(acetylamino)-2-deoxy-beta-D-galactopyra nosyl]oxy]-14,14-bis[[3-[[3-[[5-[[2-(acetylamino)-2-deoxy-b eta-D-galactopyranosyl]oxy]-1-oxopentyl]amino]propyl]amino] -3-oxopropoxy]methyl]-1,12,19,25-tetraoxo-16-oxa-13,20,24-t riazanonacos-1-yl]-4-hydroxy-2-pyrrolidinyl)methyl ester
agagtggaatgaccctcctga

SEQ ID NO: 704 - RNA, 21 nt, synthetic construct
  source 1..21: mol_type = other RNA
  modified_base 1: mod_base = OTHER; note = 2'-O-methylguanosine-3'-phosphorothioate
  modified_base 2: mod_base = OTHER; note = 2'-O-methyladenosine-3'-phosphorothioate
  modified_base 3: mod_base = OTHER; note = 2'-O-methylguanosine-3'-phosphate
  modified_base 4: mod_base = OTHER; note = 2'-O-methyluridine-3'-phosphate
  modified_base 5: mod_base = OTHER; note = 2'-O-methylguanosine-3'-phosphate
  modified_base 6: mod_base = OTHER; note = 2'-O-methylguanosine-3'-phosphate
  modified_base 7: mod_base = OTHER; note = 2'-deoxy-2'-fluoroadenosine-3'-phosphate
  modified_base 8: mod_base = OTHER; note = 2'-O-methyladenosine-3'-phosphate
  modified_base 9: mod_base = OTHER; note = 2'-deoxy-2'-fluorouridine-3'-phosphate
  modified_base 10: mod_base = OTHER; note = 2'-deoxy-2'-fluoroguanosine-3'-phosphate
  modified_base 11: mod_base = OTHER; note = 2'-deoxy-2'-fluoroadenosine-3'-phosphate
  modified_base 12: mod_base = OTHER; note = 2'-O-methylcytidine-3'-phosphate
  modified_base 13: mod_base = OTHER; note = 2'-O-methylcytidine-3'-phosphate
  modified_base 14: mod_base = OTHER; note = 2'-O-methylcytidine-3'-phosphate
  modified_base 15: mod_base = OTHER; note = 2'-O-methyluridine-3'-phosphate
  modified_base 16: mod_base = OTHER; note = 2'-O-methylcytidine-3'-phosphate
  modified_base 17: mod_base = OTHER; note = 2'-O-methylcytidine-3'-phosphate
  modified_base 18: mod_base = OTHER; note = 2'-O-methyluridine-3'-phosphate
  modified_base 19: mod_base = OTHER; note = 2'-O-methylguanosine-3'-phosphate
  modified_base 20: mod_base = OTHER; note = 2'-O-methylcytidine-3'-phosphate
  modified_base 21: mod_base = OTHER; note = 2'-O-methyladenosine-3'-phosphate ((2S,4R)-1-[29-[[2-(acetylamino)-2-deoxy-beta-D-galactopyra nosyl]oxy]-14,14-bis[[3-[[3-[[5-[[2-(acetylamino)-2-deoxy-b eta-D-galactopyranosyl]oxy]-1-oxopentyl]amino]propyl]amino] -3-oxopropoxy]methyl]-1,12,19,25-tetraoxo-16-oxa-13,20,24-t riazanonacos-1-yl]-4-hydroxy-2-pyrrolidinyl)methyl ester
gagtggaatgaccctcctgca

SEQ ID NO: 705 - RNA, 21 nt, synthetic construct
  source 1..21: mol_type = other RNA
  modified_base 1: mod_base = OTHER; note = 2'-O-methylguanosine-3'-phosphorothioate
  modified_base 2: mod_base = OTHER; note = 2'-O-methyladenosine-3'-phosphorothioate
  modified_base 3: mod_base = OTHER; note = 2'-O-methylcytidine-3'-phosphate
  modified_base 4: mod_base = OTHER; note = 2'-O-methylcytidine-3'-phosphate
  modified_base 5: mod_base = OTHER; note = 2'-O-methylcytidine-3'-phosphate
  modified_base 6: mod_base = OTHER; note = 2'-O-methyluridine-3'-phosphate
  modified_base 7: mod_base = OTHER; note = 2'-deoxy-2'-fluorocytidine-3'-phosphate
  modified_base 8: mod_base = OTHER; note = 2'-O-methylcytidine-3'-phosphate
  modified_base 9: mod_base = OTHER; note = 2'-deoxy-2'-fluorouridine-3'-phosphate
  modified_base 10: mod_base = OTHER; note = 2'-deoxy-2'-fluoroguanosine-3'-phosphate
  modified_base 11: mod_base = OTHER; note = 2'-deoxy-2'-fluorocytidine-3'-phosphate
  modified_base 12: mod_base = OTHER; note = 2'-O-methyluridine-3'-phosphate
  modified_base 13: mod_base = OTHER; note = 2'-O-methylguanosine-3'-phosphate
  modified_base 14: mod_base = OTHER; note = 2'-O-methyluridine-3'-phosphate
  modified_base 15: mod_base = OTHER; note = 2'-O-methylguanosine-3'-phosphate
  modified_base 16: mod_base = OTHER; note = 2'-O-methyladenosine-3'-phosphate
  modified_base 17: mod_base = OTHER; note = 2'-O-methyladenosine-3'-phosphate
  modified_base 18: mod_base = OTHER; note = 2'-O-methylguanosine-3'-phosphate
  modified_base 19: mod_base = OTHER; note = 2'-O-methyluridine-3'-phosphate
  modified_base 20: mod_base = OTHER; note = 2'-O-methylguanosine-3'-phosphate
  modified_base 21: mod_base = OTHER; note = 2'-O-methyladenosine-3'-phosphate ((2S,4R)-1-[29-[[2-(acetylamino)-2-deoxy-beta-D-galactopyra nosyl]oxy]-14,14-bis[[3-[[3-[[5-[[2-(acetylamino)-2-deoxy-b eta-D-galactopyranosyl]oxy]-1-oxopentyl]amino]propyl]amino] -3-oxopropoxy]methyl]-1,12,19,25-tetraoxo-16-oxa-13,20,24-t riazanonacos-1-yl]-4-hydroxy-2-pyrrolidinyl)methyl ester
gaccctcctgctgtgaagtga

SEQ ID NO: 706 - RNA, 21 nt, synthetic construct
  source 1..21: mol_type = other RNA
  modified_base 1: mod_base = OTHER; note = 2'-O-methylcytidine-3'-phosphorothioate
  modified_base 2: mod_base = OTHER; note = 2'-O-methyluridine-3'-phosphorothioate
  modified_base 3: mod_base = OTHER; note = 2'-O-methylguanosine-3'-phosphate
  modified_base 4: mod_base = OTHER; note = 2'-O-methylcytidine-3'-phosphate
  modified_base 5: mod_base = OTHER; note = 2'-O-methyluridine-3'-phosphate
  modified_base 6: mod_base = OTHER; note = 2'-O-methylguanosine-3'-phosphate
  modified_base 7: mod_base = OTHER; note = 2'-deoxy-2'-fluorouridine-3'-phosphate
  modified_base 8: mod_base = OTHER; note = 2'-O-methylguanosine-3'-phosphate
  modified_base 9: mod_base = OTHER; note = 2'-deoxy-2'-fluoroadenosine-3'-phosphate
  modified_base 10: mod_base = OTHER; note = 2'-deoxy-2'-fluoroadenosine-3'-phosphate
  modified_base 11: mod_base = OTHER; note = 2'-deoxy-2'-fluoroguanosine-3'-phosphate
  modified_base 12: mod_base = OTHER; note = 2'-O-methyluridine-3'-phosphate
  modified_base 13: mod_base = OTHER; note = 2'-O-methylguanosine-3'-phosphate
  modified_base 14: mod_base = OTHER; note = 2'-O-methylguanosine-3'-phosphate
  modified_base 15: mod_base = OTHER; note = 2'-O-methylguanosine-3'-phosphate
  modified_base 16: mod_base = OTHER; note = 2'-O-methylcytidine-3'-phosphate
  modified_base 17: mod_base = OTHER; note = 2'-O-methyluridine-3'-phosphate
  modified_base 18: mod_base = OTHER; note = 2'-O-methyladenosine-3'-phosphate
  modified_base 19: mod_base = OTHER; note = 2'-O-methylguanosine-3'-phosphate
  modified_base 20: mod_base = OTHER; note = 2'-O-methyluridine-3'-phosphate
  modified_base 21: mod_base = OTHER; note = 2'-O-methyladenosine-3'-phosphate ((2S,4R)-1-[29-[[2-(acetylamino)-2-deoxy-beta-D-galactopyra nosyl]oxy]-14,14-bis[[3-[[3-[[5-[[2-(acetylamino)-2-deoxy-b eta-D-galactopyranosyl]oxy]-1-oxopentyl]amino]propyl]amino] -3-oxopropoxy]methyl]-1,12,19,25-tetraoxo-16-oxa-13,20,24-t riazanonacos-1-yl]-4-hydroxy-2-pyrrolidinyl)methyl ester
ctgctgtgaagtgggctagta

SEQ ID NO: 707 - RNA, 21 nt, synthetic construct
  source 1..21: mol_type = other RNA
  modified_base 1: mod_base = OTHER; note = 2'-O-methylguanosine-3'-phosphorothioate
  modified_base 2: mod_base = OTHER; note = 2'-O-methyluridine-3'-phosphorothioate
  modified_base 3: mod_base = OTHER; note = 2'-O-methylguanosine-3'-phosphate
  modified_base 4: mod_base = OTHER; note = 2'-O-methylguanosine-3'-phosphate
  modified_base 5: mod_base = OTHER; note = 2'-O-methylguanosine-3'-phosphate
  modified_base 6: mod_base = OTHER; note = 2'-O-methylcytidine-3'-phosphate
  modified_base 7: mod_base = OTHER; note = 2'-deoxy-2'-fluorouridine-3'-phosphate
  modified_base 8: mod_base = OTHER; note = 2'-O-methyladenosine-3'-phosphate
  modified_base 9: mod_base = OTHER; note = 2'-deoxy-2'-fluoroguanosine-3'-phosphate
  modified_base 10: mod_base = OTHER; note = 2'-deoxy-2'-fluorouridine-3'-phosphate
  modified_base 11: mod_base = OTHER; note = 2'-deoxy-2'-fluoroguanosine-3'-phosphate
  modified_base 12: mod_base = OTHER; note = 2'-O-methyluridine-3'-phosphate
  modified_base 13: mod_base = OTHER; note = 2'-O-methylguanosine-3'-phosphate
  modified_base 14: mod_base = OTHER; note = 2'-O-methyladenosine-3'-phosphate
  modified_base 15: mod_base = OTHER; note = 2'-O-methylguanosine-3'-phosphate
  modified_base 16: mod_base = OTHER; note = 2'-O-methylcytidine-3'-phosphate
  modified_base 17: mod_base = OTHER; note = 2'-O-methyladenosine-3'-phosphate
  modified_base 18: mod_base = OTHER; note = 2'-O-methyladenosine-3'-phosphate
  modified_base 19: mod_base = OTHER; note = 2'-O-methylcytidine-3'-phosphate
  modified_base 20: mod_base = OTHER; note = 2'-O-methylcytidine-3'-phosphate
  modified_base 21: mod_base = OTHER; note = 2'-O-methyladenosine-3'-phosphate ((2S,4R)-1-[29-[[2-(acetylamino)-2-deoxy-beta-D-galactopyra nosyl]oxy]-14,14-bis[[3-[[3-[[5-[[2-(acetylamino)-2-deoxy-b eta-D-galactopyranosyl]oxy]-1-oxopentyl]amino]propyl]amino] -3-oxopropoxy]methyl]-1,12,19,25-tetraoxo-16-oxa-13,20,24-t riazanonacos-1-yl]-4-hydroxy-2-pyrrolidinyl)methyl ester
gtgggctagtgtgagcaacca

SEQ ID NO: 708 - RNA, 21 nt, synthetic construct
  source 1..21: mol_type = other RNA
  modified_base 1: mod_base = OTHER; note = 2'-O-methylguanosine-3'-phosphorothioate
  modified_base 2: mod_base = OTHER; note = 2'-O-methylguanosine-3'-phosphorothioate
  modified_base 3: mod_base = OTHER; note = 2'-O-methyluridine-3'-phosphate
  modified_base 4: mod_base = OTHER; note = 2'-O-methylguanosine-3'-phosphate
  modified_base 5: mod_base = OTHER; note = 2'-O-methylguanosine-3'-phosphate
  modified_base 6: mod_base = OTHER; note = 2'-O-methyluridine-3'-phosphate
  modified_base 7: mod_base = OTHER; note = 2'-deoxy-2'-fluorocytidine-3'-phosphate
  modified_base 8: mod_base = OTHER; note = 2'-O-methyluridine-3'-phosphate
  modified_base 9: mod_base = OTHER; note = 2'-deoxy-2'-fluoroguanosine-3'-phosphate
  modified_base 10: mod_base = OTHER; note = 2'-deoxy-2'-fluoroguanosine-3'-phosphate
  modified_base 11: mod_base = OTHER; note = 2'-deoxy-2'-fluoroadenosine-3'-phosphate
  modified_base 12: mod_base = OTHER; note = 2'-O-methyladenosine-3'-phosphate
  modified_base 13: mod_base = OTHER; note = 2'-O-methyluridine-3'-phosphate
  modified_base 14: mod_base = OTHER; note = 2'-O-methyladenosine-3'-phosphate
  modified_base 15: mod_base = OTHER; note = 2'-O-methyladenosine-3'-phosphate
  modified_base 16: mod_base = OTHER; note = 2'-O-methyluridine-3'-phosphate
  modified_base 17: mod_base = OTHER; note = 2'-O-methylcytidine-3'-phosphate
  modified_base 18: mod_base = OTHER; note = 2'-O-methyladenosine-3'-phosphate
  modified_base 19: mod_base = OTHER; note = 2'-O-methylguanosine-3'-phosphate
  modified_base 20: mod_base = OTHER; note = 2'-O-methyladenosine-3'-phosphate
  modified_base 21: mod_base = OTHER; note = 2'-O-methyladenosine-3'-phosphate ((2S,4R)-1-[29-[[2-(acetylamino)-2-deoxy-beta-D-galactopyra nosyl]oxy]-14,14-bis[[3-[[3-[[5-[[2-(acetylamino)-2-deoxy-b eta-D-galactopyranosyl]oxy]-1-oxopentyl]amino]propyl]amino] -3-oxopropoxy]methyl]-1,12,19,25-tetraoxo-16-oxa-13,20,24-t riazanonacos-1-yl]-4-hydroxy-2-pyrrolidinyl)methyl ester
ggtggtctggaataatcagaa

SEQ ID NO: 709 - RNA, 21 nt, synthetic construct
  source 1..21: mol_type = other RNA
  modified_base 1: mod_base = OTHER; note = 2'-O-methyluridine-3'-phosphorothioate
  modified_base 2: mod_base = OTHER; note = 2'-O-methylguanosine-3'-phosphorothioate
  modified_base 3: mod_base = OTHER; note = 2'-O-methylguanosine-3'-phosphate
  modified_base 4: mod_base = OTHER; note = 2'-O-methyluridine-3'-phosphate
  modified_base 5: mod_base = OTHER; note = 2'-O-methylcytidine-3'-phosphate
  modified_base 6: mod_base = OTHER; note = 2'-O-methyluridine-3'-phosphate
  modified_base 7: mod_base = OTHER; note = 2'-deoxy-2'-fluoroguanosine-3'-phosphate
  modified_base 8: mod_base = OTHER; note = 2'-O-methylguanosine-3'-phosphate
  modified_base 9: mod_base = OTHER; note = 2'-deoxy-2'-fluoroadenosine-3'-phosphate
  modified_base 10: mod_base = OTHER; note = 2'-deoxy-2'-fluoroadenosine-3'-phosphate
  modified_base 11: mod_base = OTHER; note = 2'-deoxy-2'-fluorouridine-3'-phosphate
  modified_base 12: mod_base = OTHER; note = 2'-O-methyladenosine-3'-phosphate
  modified_base 13: mod_base = OTHER; note = 2'-O-methyladenosine-3'-phosphate
  modified_base 14: mod_base = OTHER; note = 2'-O-methyluridine-3'-phosphate
  modified_base 15: mod_base = OTHER; note = 2'-O-methylcytidine-3'-phosphate
  modified_base 16: mod_base = OTHER; note = 2'-O-methyladenosine-3'-phosphate
  modified_base 17: mod_base = OTHER; note = 2'-O-methylguanosine-3'-phosphate
  modified_base 18: mod_base = OTHER; note = 2'-O-methyladenosine-3'-phosphate
  modified_base 19: mod_base = OTHER; note = 2'-O-methyladenosine-3'-phosphate
  modified_base 20: mod_base = OTHER; note = 2'-O-methyluridine-3'-phosphate
  modified_base 21: mod_base = OTHER; note = 2'-O-methyladenosine-3'-phosphate ((2S,4R)-1-[29-[[2-(acetylamino)-2-deoxy-beta-D-galactopyra nosyl]oxy]-14,14-bis[[3-[[3-[[5-[[2-(acetylamino)-2-deoxy-b eta-D-galactopyranosyl]oxy]-1-oxopentyl]amino]propyl]amino] -3-oxopropoxy]methyl]-1,12,19,25-tetraoxo-16-oxa-13,20,24-t riazanonacos-1-yl]-4-hydroxy-2-pyrrolidinyl)methyl ester
tggtctggaataatcagaata

SEQ ID NO: 710 - RNA, 21 nt, synthetic construct
  source 1..21: mol_type = other RNA
  modified_base 1: mod_base = OTHER; note = 2'-O-methylguanosine-3'-phosphorothioate
  modified_base 2: mod_base = OTHER; note = 2'-O-methylguanosine-3'-phosphorothioate
  modified_base 3: mod_base = OTHER; note = 2'-O-methyluridine-3'-phosphate
  modified_base 4: mod_base = OTHER; note = 2'-O-methylcytidine-3'-phosphate
  modified_base 5: mod_base = OTHER; note = 2'-O-methyluridine-3'-phosphate
  modified_base 6: mod_base = OTHER; note = 2'-O-methylguanosine-3'-phosphate
  modified_base 7: mod_base = OTHER; note = 2'-deoxy-2'-fluoroguanosine-3'-phosphate
  modified_base 8: mod_base = OTHER; note = 2'-O-methyladenosine-3'-phosphate
  modified_base 9: mod_base = OTHER; note = 2'-deoxy-2'-fluoroadenosine-3'-phosphate
  modified_base 10: mod_base = OTHER; note = 2'-deoxy-2'-fluorouridine-3'-phosphate
  modified_base 11: mod_base = OTHER; note = 2'-deoxy-2'-fluoroadenosine-3'-phosphate
  modified_base 12: mod_base = OTHER; note = 2'-O-methyladenosine-3'-phosphate
  modified_base 13: mod_base = OTHER; note = 2'-O-methyluridine-3'-phosphate
  modified_base 14: mod_base = OTHER; note = 2'-O-methylcytidine-3'-phosphate
  modified_base 15: mod_base = OTHER; note = 2'-O-methyladenosine-3'-phosphate
  modified_base 16: mod_base = OTHER; note = 2'-O-methylguanosine-3'-phosphate
  modified_base 17: mod_base = OTHER; note = 2'-O-methyladenosine-3'-phosphate
  modified_base 18: mod_base = OTHER; note = 2'-O-methyladenosine-3'-phosphate
  modified_base 19: mod_base = OTHER; note = 2'-O-methyluridine-3'-phosphate
  modified_base 20: mod_base = OTHER; note = 2'-O-methyladenosine-3'-phosphate
  modified_base 21: mod_base = OTHER; note = 2'-O-methyladenosine-3'-phosphate ((2S,4R)-1-[29-[[2-(acetylamino)-2-deoxy-beta-D-galactopyra nosyl]oxy]-14,14-bis[[3-[[3-[[5-[[2-(acetylamino)-2-deoxy-b eta-D-galactopyranosyl]oxy]-1-oxopentyl]amino]propyl]amino] -3-oxopropoxy]methyl]-1,12,19,25-tetraoxo-16-oxa-13,20,24-t riazanonacos-1-yl]-4-hydroxy-2-pyrrolidinyl)methyl ester
ggtctggaataatcagaataa

SEQ ID NO: 711 - RNA, 21 nt, synthetic construct
  source 1..21: mol_type = other RNA
  modified_base 1: mod_base = OTHER; note = 2'-O-methyladenosine-3'-phosphorothioate
  modified_base 2: mod_base = OTHER; note = 2'-O-methyladenosine-3'-phosphorothioate
  modified_base 3: mod_base = OTHER; note = 2'-O-methyluridine-3'-phosphate
  modified_base 4: mod_base = OTHER; note = 2'-O-methyladenosine-3'-phosphate
  modified_base 5: mod_base = OTHER; note = 2'-O-methyladenosine-3'-phosphate
  modified_base 6: mod_base = OTHER; note = 2'-O-methyluridine-3'-phosphate
  modified_base 7: mod_base = OTHER; note = 2'-deoxy-2'-fluorocytidine-3'-phosphate
  modified_base 8: mod_base = OTHER; note = 2'-O-methyladenosine-3'-phosphate
  modified_base 9: mod_base = OTHER; note = 2'-deoxy-2'-fluoroguanosine-3'-phosphate
  modified_base 10: mod_base = OTHER; note = 2'-deoxy-2'-fluoroadenosine-3'-phosphate
  modified_base 11: mod_base = OTHER; note = 2'-deoxy-2'-fluoroadenosine-3'-phosphate
  modified_base 12: mod_base = OTHER; note = 2'-O-methyluridine-3'-phosphate
  modified_base 13: mod_base = OTHER; note = 2'-O-methyladenosine-3'-phosphate
  modified_base 14: mod_base = OTHER; note = 2'-O-methyladenosine-3'-phosphate
  modified_base 15: mod_base = OTHER; note = 2'-O-methyladenosine-3'-phosphate
  modified_base 16: mod_base = OTHER; note = 2'-O-methyladenosine-3'-phosphate
  modified_base 17: mod_base = OTHER; note = 2'-O-methyladenosine-3'-phosphate
  modified_base 18: mod_base = OTHER; note = 2'-O-methylcytidine-3'-phosphate
  modified_base 19: mod_base = OTHER; note = 2'-O-methylcytidine-3'-phosphate
  modified_base 20: mod_base = OTHER; note = 2'-O-methylcytidine-3'-phosphate
  modified_base 21: mod_base = OTHER; note = 2'-O-methyladenosine-3'-phosphate ((2S,4R)-1-[29-[[2-(acetylamino)-2-deoxy-beta-D-galactopyra nosyl]oxy]-14,14-bis[[3-[[3-[[5-[[2-(acetylamino)-2-deoxy-b eta-D-galactopyranosyl]oxy]-1-oxopentyl]amino]propyl]amino] -3-oxopropoxy]methyl]-1,12,19,25-tetraoxo-16-oxa-13,20,24-t riazanonacos-1-yl]-4-hydroxy-2-pyrrolidinyl)methyl ester
aataatcagaataaaaaccca

SEQ ID NO: 712 - RNA, 21 nt, synthetic construct
  source 1..21: mol_type = other RNA
  modified_base 1: mod_base = OTHER; note = 2'-O-methyladenosine-3'-phosphorothioate
  modified_base 2: mod_base = OTHER; note = 2'-O-methyluridine-3'-phosphorothioate
  modified_base 3: mod_base = OTHER; note = 2'-O-methyladenosine-3'-phosphate
  modified_base 4: mod_base = OTHER; note = 2'-O-methyladenosine-3'-phosphate
  modified_base 5: mod_base = OTHER; note = 2'-O-methyluridine-3'-phosphate
  modified_base 6: mod_base = OTHER; note = 2'-O-methylcytidine-3'-phosphate
  modified_base 7: mod_base = OTHER; note = 2'-deoxy-2'-fluoroadenosine-3'-phosphate
  modified_base 8: mod_base = OTHER; note = 2'-O-methylguanosine-3'-phosphate
  modified_base 9: mod_base = OTHER; note = 2'-deoxy-2'-fluoroadenosine-3'-phosphate
  modified_base 10: mod_base = OTHER; note = 2'-deoxy-2'-fluoroadenosine-3'-phosphate
  modified_base 11: mod_base = OTHER; note = 2'-deoxy-2'-fluorouridine-3'-phosphate
  modified_base 12: mod_base = OTHER; note = 2'-O-methyladenosine-3'-phosphate
  modified_base 13: mod_base = OTHER; note = 2'-O-methyladenosine-3'-phosphate
  modified_base 14: mod_base = OTHER; note = 2'-O-methyladenosine-3'-phosphate
  modified_base 15: mod_base = OTHER; note = 2'-O-methyladenosine-3'-phosphate
  modified_base 16: mod_base = OTHER; note = 2'-O-methyladenosine-3'-phosphate
  modified_base 17: mod_base = OTHER; note = 2'-O-methylcytidine-3'-phosphate
  modified_base 18: mod_base = OTHER; note = 2'-O-methylcytidine-3'-phosphate
  modified_base 19: mod_base = OTHER; note = 2'-O-methylcytidine-3'-phosphate
  modified_base 20: mod_base = OTHER; note = 2'-O-methyluridine-3'-phosphate
  modified_base 21: mod_base = OTHER; note = 2'-O-methyladenosine-3'-phosphate ((2S,4R)-1-[29-[[2-(acetylamino)-2-deoxy-beta-D-galactopyra nosyl]oxy]-14,14-bis[[3-[[3-[[5-[[2-(acetylamino)-2-deoxy-b eta-D-galactopyranosyl]oxy]-1-oxopentyl]amino]propyl]amino] -3-oxopropoxy]methyl]-1,12,19,25-tetraoxo-16-oxa-13,20,24-t riazanonacos-1-yl]-4-hydroxy-2-pyrrolidinyl)methyl ester
ataatcagaataaaaacccta

SEQ ID NO: 713 - RNA, 21 nt, synthetic construct
  source 1..21: mol_type = other RNA
  modified_base 1: mod_base = OTHER; note = 2'-O-methyluridine-3'-phosphorothioate
  modified_base 2: mod_base = OTHER; note = 2'-O-methyladenosine-3'-phosphorothioate
  modified_base 3: mod_base = OTHER; note = 2'-O-methyladenosine-3'-phosphate
  modified_base 4: mod_base = OTHER; note = 2'-O-methyluridine-3'-phosphate
  modified_base 5: mod_base = OTHER; note = 2'-O-methylcytidine-3'-phosphate
  modified_base 6: mod_base = OTHER; note = 2'-O-methyladenosine-3'-phosphate
  modified_base 7: mod_base = OTHER; note = 2'-deoxy-2'-fluoroguanosine-3'-phosphate
  modified_base 8: mod_base = OTHER; note = 2'-O-methyladenosine-3'-phosphate
  modified_base 9: mod_base = OTHER; note = 2'-deoxy-2'-fluoroadenosine-3'-phosphate
  modified_base 10: mod_base = OTHER; note = 2'-deoxy-2'-fluorouridine-3'-phosphate
  modified_base 11: mod_base = OTHER; note = 2'-deoxy-2'-fluoroadenosine-3'-phosphate
  modified_base 12: mod_base = OTHER; note = 2'-O-methyladenosine-3'-phosphate
  modified_base 13: mod_base = OTHER; note = 2'-O-methyladenosine-3'-phosphate
  modified_base 14: mod_base = OTHER; note = 2'-O-methyladenosine-3'-phosphate
  modified_base 15: mod_base = OTHER; note = 2'-O-methyladenosine-3'-phosphate
  modified_base 16: mod_base = OTHER; note = 2'-O-methylcytidine-3'-phosphate
  modified_base 17: mod_base = OTHER; note = 2'-O-methylcytidine-3'-phosphate
  modified_base 18: mod_base = OTHER; note = 2'-O-methylcytidine-3'-phosphate
  modified_base 19: mod_base = OTHER; note = 2'-O-methyluridine-3'-phosphate
  modified_base 20: mod_base = OTHER; note = 2'-O-methylcytidine-3'-phosphate
  modified_base 21: mod_base = OTHER; note = 2'-O-methyladenosine-3'-phosphate ((2S,4R)-1-[29-[[2-(acetylamino)-2-deoxy-beta-D-galactopyra nosyl]oxy]-14,14-bis[[3-[[3-[[5-[[2-(acetylamino)-2-deoxy-b eta-D-galactopyranosyl]oxy]-1-oxopentyl]amino]propyl]amino] -3-oxopropoxy]methyl]-1,12,19,25-tetraoxo-16-oxa-13,20,24-t riazanonacos-1-yl]-4-hydroxy-2-pyrrolidinyl)methyl ester
taatcagaataaaaaccctca

SEQ ID NO: 714 - RNA, 21 nt, synthetic construct
  source 1..21: mol_type = other RNA
  modified_base 1: mod_base = OTHER; note = 2'-O-methyladenosine-3'-phosphorothioate
  modified_base 2: mod_base = OTHER; note = 2'-O-methyladenosine-3'-phosphorothioate
  modified_base 3: mod_base = OTHER; note = 2'-O-methyluridine-3'-phosphate
  modified_base 4: mod_base = OTHER; note = 2'-O-methylcytidine-3'-phosphate
  modified_base 5: mod_base = OTHER; note = 2'-O-methyladenosine-3'-phosphate
  modified_base 6: mod_base = OTHER; note = 2'-O-methylguanosine-3'-phosphate
  modified_base 7: mod_base = OTHER; note = 2'-deoxy-2'-fluoroadenosine-3'-phosphate
  modified_base 8: mod_base = OTHER; note = 2'-O-methyladenosine-3'-phosphate
  modified_base 9: mod_base = OTHER; note = 2'-deoxy-2'-fluorouridine-3'-phosphate
  modified_base 10: mod_base = OTHER; note = 2'-deoxy-2'-fluoroadenosine-3'-phosphate
  modified_base 11: mod_base = OTHER; note = 2'-deoxy-2'-fluoroadenosine-3'-phosphate
  modified_base 12: mod_base = OTHER; note = 2'-O-methyladenosine-3'-phosphate
  modified_base 13: mod_base = OTHER; note = 2'-O-methyladenosine-3'-phosphate
  modified_base 14: mod_base = OTHER; note = 2'-O-methyladenosine-3'-phosphate
  modified_base 15: mod_base = OTHER; note = 2'-O-methylcytidine-3'-phosphate
  modified_base 16: mod_base = OTHER; note = 2'-O-methylcytidine-3'-phosphate
  modified_base 17: mod_base = OTHER; note = 2'-O-methylcytidine-3'-phosphate
  modified_base 18: mod_base = OTHER; note = 2'-O-methyluridine-3'-phosphate
  modified_base 19: mod_base = OTHER; note = 2'-O-methylcytidine-3'-phosphate
  modified_base 20: mod_base = OTHER; note = 2'-O-methylcytidine-3'-phosphate
  modified_base 21: mod_base = OTHER; note = 2'-O-methyladenosine-3'-phosphate ((2S,4R)-1-[29-[[2-(acetylamino)-2-deoxy-beta-D-galactopyra nosyl]oxy]-14,14-bis[[3-[[3-[[5-[[2-(acetylamino)-2-deoxy-b eta-D-galactopyranosyl]oxy]-1-oxopentyl]amino]propyl]amino] -3-oxopropoxy]methyl]-1,12,19,25-tetraoxo-16-oxa-13,20,24-t riazanonacos-1-yl]-4-hydroxy-2-pyrrolidinyl)methyl ester
aatcagaataaaaaccctcca

SEQ ID NO: 715 - RNA, 21 nt, synthetic construct
  source 1..21: mol_type = other RNA
  modified_base 1: mod_base = OTHER; note = 2'-O-methylcytidine-3'-phosphorothioate
  modified_base 2: mod_base = OTHER; note = 2'-O-methyluridine-3'-phosphorothioate
  modified_base 3: mod_base = OTHER; note = 2'-O-methylguanosine-3'-phosphate
  modified_base 4: mod_base = OTHER; note = 2'-O-methylcytidine-3'-phosphate
  modified_base 5: mod_base = OTHER; note = 2'-O-methyladenosine-3'-phosphate
  modified_base 6: mod_base = OTHER; note = 2'-O-methylguanosine-3'-phosphate
  modified_base 7: mod_base = OTHER; note = 2'-deoxy-2'-fluoroadenosine-3'-phosphate
  modified_base 8: mod_base = OTHER; note = 2'-O-methyladenosine-3'-phosphate
  modified_base 9: mod_base = OTHER; note = 2'-deoxy-2'-fluoroadenosine-3'-phosphate
  modified_base 10: mod_base = OTHER; note = 2'-deoxy-2'-fluoroadenosine-3'-phosphate
  modified_base 11: mod_base = OTHER; note = 2'-deoxy-2'-fluorocytidine-3'-phosphate
  modified_base 12: mod_base = OTHER; note = 2'-O-methyladenosine-3'-phosphate
  modified_base 13: mod_base = OTHER; note = 2'-O-methyladenosine-3'-phosphate
  modified_base 14: mod_base = OTHER; note = 2'-O-methylguanosine-3'-phosphate
  modified_base 15: mod_base = OTHER; note = 2'-O-methylcytidine-3'-phosphate
  modified_base 16: mod_base = OTHER; note = 2'-O-methyluridine-3'-phosphate
  modified_base 17: mod_base = OTHER; note = 2'-O-methyladenosine-3'-phosphate
  modified_base 18: mod_base = OTHER; note = 2'-O-methyladenosine-3'-phosphate
  modified_base 19: mod_base = OTHER; note = 2'-O-methylguanosine-3'-phosphate
  modified_base 20: mod_base = OTHER; note = 2'-O-methyluridine-3'-phosphate
  modified_base 21: mod_base = OTHER; note = 2'-O-methyladenosine-3'-phosphate ((2S,4R)-1-[29-[[2-(acetylamino)-2-deoxy-beta-D-galactopyra nosyl]oxy]-14,14-bis[[3-[[3-[[5-[[2-(acetylamino)-2-deoxy-b eta-D-galactopyranosyl]oxy]-1-oxopentyl]amino]propyl]amino] -3-oxopropoxy]methyl]-1,12,19,25-tetraoxo-16-oxa-13,20,24-t riazanonacos-1-yl]-4-hydroxy-2-pyrrolidinyl)methyl ester
ctgcagaaaacaagctaagta

SEQ ID NO: 716 - RNA, 21 nt, synthetic construct
  source 1..21: mol_type = other RNA
  modified_base 1: mod_base = OTHER; note = 2'-O-methyladenosine-3'-phosphorothioate
  modified_base 2: mod_base = OTHER; note = 2'-O-methylguanosine-3'-phosphorothioate
  modified_base 3: mod_base = OTHER; note = 2'-O-methyladenosine-3'-phosphate
  modified_base 4: mod_base = OTHER; note = 2'-O-methyladenosine-3'-phosphate
  modified_base 5: mod_base = OTHER; note = 2'-O-methyladenosine-3'-phosphate
  modified_base 6: mod_base = OTHER; note = 2'-O-methyladenosine-3'-phosphate
  modified_base 7: mod_base = OTHER; note = 2'-deoxy-2'-fluorocytidine-3'-phosphate
  modified_base 8: mod_base = OTHER; note = 2'-O-methyladenosine-3'-phosphate
  modified_base 9: mod_base = OTHER; note = 2'-deoxy-2'-fluoroadenosine-3'-phosphate
  modified_base 10: mod_base = OTHER; note = 2'-deoxy-2'-fluoroguanosine-3'-phosphate
  modified_base 11: mod_base = OTHER; note = 2'-deoxy-2'-fluorocytidine-3'-phosphate
  modified_base 12: mod_base = OTHER; note = 2'-O-methyluridine-3'-phosphate
  modified_base 13: mod_base = OTHER; note = 2'-O-methyladenosine-3'-phosphate
  modified_base 14: mod_base = OTHER; note = 2'-O-methyladenosine-3'-phosphate
  modified_base 15: mod_base = OTHER; note = 2'-O-methylguanosine-3'-phosphate
  modified_base 16: mod_base = OTHER; note = 2'-O-methyluridine-3'-phosphate
  modified_base 17: mod_base = OTHER; note = 2'-O-methyladenosine-3'-phosphate
  modified_base 18: mod_base = OTHER; note = 2'-O-methyladenosine-3'-phosphate
  modified_base 19: mod_base = OTHER; note = 2'-O-methyluridine-3'-phosphate
  modified_base 20: mod_base = OTHER; note = 2'-O-methylcytidine-3'-phosphate
  modified_base 21: mod_base = OTHER; note = 2'-O-methyladenosine-3'-phosphate ((2S,4R)-1-[29-[[2-(acetylamino)-2-deoxy-beta-D-galactopyra nosyl]oxy]-14,14-bis[[3-[[3-[[5-[[2-(acetylamino)-2-deoxy-b eta-D-galactopyranosyl]oxy]-1-oxopentyl]amino]propyl]amino] -3-oxopropoxy]methyl]-1,12,19,25-tetraoxo-16-oxa-13,20,24-t riazanonacos-1-yl]-4-hydroxy-2-pyrrolidinyl)methyl ester
agaaaacaagctaagtaatca

SEQ ID NO: 717 - RNA, 21 nt, synthetic construct
  source 1..21: mol_type = other RNA
  modified_base 1: mod_base = OTHER; note = 2'-O-methyladenosine-3'-phosphorothioate
  modified_base 2: mod_base = OTHER; note = 2'-O-methyladenosine-3'-phosphorothioate
  modified_base 3: mod_base = OTHER; note = 2'-O-methyladenosine-3'-phosphate
  modified_base 4: mod_base = OTHER; note = 2'-O-methylcytidine-3'-phosphate
  modified_base 5: mod_base = OTHER; note = 2'-O-methyladenosine-3'-phosphate
  modified_base 6: mod_base = OTHER; note = 2'-O-methyladenosine-3'-phosphate
  modified_base 7: mod_base = OTHER; note = 2'-deoxy-2'-fluoroguanosine-3'-phosphate
  modified_base 8: mod_base = OTHER; note = 2'-O-methylcytidine-3'-phosphate
  modified_base 9: mod_base = OTHER; note = 2'-deoxy-2'-fluorouridine-3'-phosphate
  modified_base 10: mod_base = OTHER; note = 2'-deoxy-2'-fluoroadenosine-3'-phosphate
  modified_base 11: mod_base = OTHER; note = 2'-deoxy-2'-fluoroadenosine-3'-phosphate
  modified_base 12: mod_base = OTHER; note = 2'-O-methylguanosine-3'-phosphate
  modified_base 13: mod_base = OTHER; note = 2'-O-methyluridine-3'-phosphate
  modified_base 14: mod_base = OTHER; note = 2'-O-methyladenosine-3'-phosphate
  modified_base 15: mod_base = OTHER; note = 2'-O-methyladenosine-3'-phosphate
  modified_base 16: mod_base = OTHER; note = 2'-O-methyluridine-3'-phosphate
  modified_base 17: mod_base = OTHER; note = 2'-O-methylcytidine-3'-phosphate
  modified_base 18: mod_base = OTHER; note = 2'-O-methylguanosine-3'-phosphate
  modified_base 19: mod_base = OTHER; note = 2'-O-methyluridine-3'-phosphate
  modified_base 20: mod_base = OTHER; note = 2'-O-methyluridine-3'-phosphate
  modified_base 21: mod_base = OTHER; note = 2'-O-methyladenosine-3'-phosphate ((2S,4R)-1-[29-[[2-(acetylamino)-2-deoxy-beta-D-galactopyra nosyl]oxy]-14,14-bis[[3-[[3-[[5-[[2-(acetylamino)-2-deoxy-b eta-D-galactopyranosyl]oxy]-1-oxopentyl]amino]propyl]amino] -3-oxopropoxy]methyl]-1,12,19,25-tetraoxo-16-oxa-13,20,24-t riazanonacos-1-yl]-4-hydroxy-2-pyrrolidinyl)methyl ester
aaacaagctaagtaatcgtta

SEQ ID NO: 718 - RNA, 21 nt, synthetic construct
  source 1..21: mol_type = other RNA
  modified_base 1: mod_base = OTHER; note = 2'-O-methyladenosine-3'-phosphorothioate
  modified_base 2: mod_base = OTHER; note = 2'-O-methyladenosine-3'-phosphorothioate
  modified_base 3: mod_base = OTHER; note = 2'-O-methylcytidine-3'-phosphate
  modified_base 4: mod_base = OTHER; note = 2'-O-methyladenosine-3'-phosphate
  modified_base 5: mod_base = OTHER; note = 2'-O-methyladenosine-3'-phosphate
  modified_base 6: mod_base = OTHER; note = 2'-O-methylguanosine-3'-phosphate
  modified_base 7: mod_base = OTHER; note = 2'-deoxy-2'-fluorocytidine-3'-phosphate
  modified_base 8: mod_base = OTHER; note = 2'-O-methyluridine-3'-phosphate
  modified_base 9: mod_base = OTHER; note = 2'-deoxy-2'-fluoroadenosine-3'-phosphate
  modified_base 10: mod_base = OTHER; note = 2'-deoxy-2'-fluoroadenosine-3'-phosphate
  modified_base 11: mod_base = OTHER; note = 2'-deoxy-2'-fluoroguanosine-3'-phosphate
  modified_base 12: mod_base = OTHER; note = 2'-O-methyluridine-3'-phosphate
  modified_base 13: mod_base = OTHER; note = 2'-O-methyladenosine-3'-phosphate
  modified_base 14: mod_base = OTHER; note = 2'-O-methyladenosine-3'-phosphate
  modified_base 15: mod_base = OTHER; note = 2'-O-methyluridine-3'-phosphate
  modified_base 16: mod_base = OTHER; note = 2'-O-methylcytidine-3'-phosphate
  modified_base 17: mod_base = OTHER; note = 2'-O-methylguanosine-3'-phosphate
  modified_base 18: mod_base = OTHER; note = 2'-O-methyluridine-3'-phosphate
  modified_base 19: mod_base = OTHER; note = 2'-O-methyluridine-3'-phosphate
  modified_base 20: mod_base = OTHER; note = 2'-O-methyluridine-3'-phosphate
  modified_base 21: mod_base = OTHER; note = 2'-O-methyladenosine-3'-phosphate ((2S,4R)-1-[29-[[2-(acetylamino)-2-deoxy-beta-D-galactopyra nosyl]oxy]-14,14-bis[[3-[[3-[[5-[[2-(acetylamino)-2-deoxy-b eta-D-galactopyranosyl]oxy]-1-oxopentyl]amino]propyl]amino] -3-oxopropoxy]methyl]-1,12,19,25-tetraoxo-16-oxa-13,20,24-t riazanonacos-1-yl]-4-hydroxy-2-pyrrolidinyl)methyl ester
aacaagctaagtaatcgttta

SEQ ID NO: 719 - RNA, 21 nt, synthetic construct
  source 1..21: mol_type = other RNA
  modified_base 1: mod_base = OTHER; note = 2'-O-methyladenosine-3'-phosphorothioate
  modified_base 2: mod_base = OTHER; note = 2'-O-methylcytidine-3'-phosphorothioate
  modified_base 3: mod_base = OTHER; note = 2'-O-methyladenosine-3'-phosphate
  modified_base 4: mod_base = OTHER; note = 2'-O-methyladenosine-3'-phosphate
  modified_base 5: mod_base = OTHER; note = 2'-O-methylguanosine-3'-phosphate
  modified_base 6: mod_base = OTHER; note = 2'-O-methylcytidine-3'-phosphate
  modified_base 7: mod_base = OTHER; note = 2'-deoxy-2'-fluorouridine-3'-phosphate
  modified_base 8: mod_base = OTHER; note = 2'-O-methyladenosine-3'-phosphate
  modified_base 9: mod_base = OTHER; note = 2'-deoxy-2'-fluoroadenosine-3'-phosphate
  modified_base 10: mod_base = OTHER; note = 2'-deoxy-2'-fluoroguanosine-3'-phosphate
  modified_base 11: mod_base = OTHER; note = 2'-deoxy-2'-fluorouridine-3'-phosphate
  modified_base 12: mod_base = OTHER; note = 2'-O-methyladenosine-3'-phosphate
  modified_base 13: mod_base = OTHER; note = 2'-O-methyladenosine-3'-phosphate
  modified_base 14: mod_base = OTHER; note = 2'-O-methyluridine-3'-phosphate
  modified_base 15: mod_base = OTHER; note = 2'-O-methylcytidine-3'-phosphate
  modified_base 16: mod_base = OTHER; note = 2'-O-methylguanosine-3'-phosphate
  modified_base 17: mod_base = OTHER; note = 2'-O-methyluridine-3'-phosphate
  modified_base 18: mod_base = OTHER; note = 2'-O-methyluridine-3'-phosphate
  modified_base 19: mod_base = OTHER; note = 2'-O-methyluridine-3'-phosphate
  modified_base 20: mod_base = OTHER; note = 2'-O-methylcytidine-3'-phosphate
  modified_base 21: mod_base = OTHER; note = 2'-O-methyladenosine-3'-phosphate ((2S,4R)-1-[29-[[2-(acetylamino)-2-deoxy-beta-D-galactopyra nosyl]oxy]-14,14-bis[[3-[[3-[[5-[[2-(acetylamino)-2-deoxy-b eta-D-galactopyranosyl]oxy]-1-oxopentyl]amino]propyl]amino] -3-oxopropoxy]methyl]-1,12,19,25-tetraoxo-16-oxa-13,20,24-t riazanonacos-1-yl]-4-hydroxy-2-pyrrolidinyl)methyl ester
acaagctaagtaatcgtttca

SEQ ID NO: 720 - RNA, 21 nt, synthetic construct
  source 1..21: mol_type = other RNA
  modified_base 1: mod_base = OTHER; note = 2'-O-methylcytidine-3'-phosphorothioate
  modified_base 2: mod_base = OTHER; note = 2'-O-methyladenosine-3'-phosphorothioate
  modified_base 3: mod_base = OTHER; note = 2'-O-methyladenosine-3'-phosphate
  modified_base 4: mod_base = OTHER; note = 2'-O-methylguanosine-3'-phosphate
  modified_base 5: mod_base = OTHER; note = 2'-O-methylcytidine-3'-phosphate
  modified_base 6: mod_base = OTHER; note = 2'-O-methyluridine-3'-phosphate
  modified_base 7: mod_base = OTHER; note = 2'-deoxy-2'-fluoroadenosine-3'-phosphate
  modified_base 8: mod_base = OTHER; note = 2'-O-methyladenosine-3'-phosphate
  modified_base 9: mod_base = OTHER; note = 2'-deoxy-2'-fluoroguanosine-3'-phosphate
  modified_base 10: mod_base = OTHER; note = 2'-deoxy-2'-fluorouridine-3'-phosphate
  modified_base 11: mod_base = OTHER; note = 2'-deoxy-2'-fluoroadenosine-3'-phosphate
  modified_base 12: mod_base = OTHER; note = 2'-O-methyladenosine-3'-phosphate
  modified_base 13: mod_base = OTHER; note = 2'-O-methyluridine-3'-phosphate
  modified_base 14: mod_base = OTHER; note = 2'-O-methylcytidine-3'-phosphate
  modified_base 15: mod_base = OTHER; note = 2'-O-methylguanosine-3'-phosphate
  modified_base 16: mod_base = OTHER; note = 2'-O-methyluridine-3'-phosphate
  modified_base 17: mod_base = OTHER; note = 2'-O-methyluridine-3'-phosphate
  modified_base 18: mod_base = OTHER; note = 2'-O-methyluridine-3'-phosphate
  modified_base 19: mod_base = OTHER; note = 2'-O-methylcytidine-3'-phosphate
  modified_base 20: mod_base = OTHER; note = 2'-O-methyluridine-3'-phosphate
  modified_base 21: mod_base = OTHER; note = 2'-O-methyladenosine-3'-phosphate ((2S,4R)-1-[29-[[2-(acetylamino)-2-deoxy-beta-D-galactopyra nosyl]oxy]-14,14-bis[[3-[[3-[[5-[[2-(acetylamino)-2-deoxy-b eta-D-galactopyranosyl]oxy]-1-oxopentyl]amino]propyl]amino] -3-oxopropoxy]methyl]-1,12,19,25-tetraoxo-16-oxa-13,20,24-t riazanonacos-1-yl]-4-hydroxy-2-pyrrolidinyl)methyl ester
caagctaagtaatcgtttcta

SEQ ID NO: 721 - RNA, 21 nt, synthetic construct
  source 1..21: mol_type = other RNA
  modified_base 1: mod_base = OTHER; note = 2'-O-methyladenosine-3'-phosphorothioate
  modified_base 2: mod_base = OTHER; note = 2'-O-methyladenosine-3'-phosphorothioate
  modified_base 3: mod_base = OTHER; note = 2'-O-methylguanosine-3'-phosphate
  modified_base 4: mod_base = OTHER; note = 2'-O-methylcytidine-3'-phosphate
  modified_base 5: mod_base = OTHER; note = 2'-O-methyluridine-3'-phosphate
  modified_base 6: mod_base = OTHER; note = 2'-O-methyladenosine-3'-phosphate
  modified_base 7: mod_base = OTHER; note = 2'-deoxy-2'-fluoroadenosine-3'-phosphate
  modified_base 8: mod_base = OTHER; note = 2'-O-methylguanosine-3'-phosphate
  modified_base 9: mod_base = OTHER; note = 2'-deoxy-2'-fluorouridine-3'-phosphate
  modified_base 10: mod_base = OTHER; note = 2'-deoxy-2'-fluoroadenosine-3'-phosphate
  modified_base 11: mod_base = OTHER; note = 2'-deoxy-2'-fluoroadenosine-3'-phosphate
  modified_base 12: mod_base = OTHER; note = 2'-O-methyluridine-3'-phosphate
  modified_base 13: mod_base = OTHER; note = 2'-O-methylcytidine-3'-phosphate
  modified_base 14: mod_base = OTHER; note = 2'-O-methylguanosine-3'-phosphate
  modified_base 15: mod_base = OTHER; note = 2'-O-methyluridine-3'-phosphate
  modified_base 16: mod_base = OTHER; note = 2'-O-methyluridine-3'-phosphate
  modified_base 17: mod_base = OTHER; note = 2'-O-methyluridine-3'-phosphate
  modified_base 18: mod_base = OTHER; note = 2'-O-methylcytidine-3'-phosphate
  modified_base 19: mod_base = OTHER; note = 2'-O-methyluridine-3'-phosphate
  modified_base 20: mod_base = OTHER; note = 2'-O-methyluridine-3'-phosphate
  modified_base 21: mod_base = OTHER; note = 2'-O-methyladenosine-3'-phosphate ((2S,4R)-1-[29-[[2-(acetylamino)-2-deoxy-beta-D-galactopyra nosyl]oxy]-14,14-bis[[3-[[3-[[5-[[2-(acetylamino)-2-deoxy-b eta-D-galactopyranosyl]oxy]-1-oxopentyl]amino]propyl]amino] -3-oxopropoxy]methyl]-1,12,19,25-tetraoxo-16-oxa-13,20,24-t riazanonacos-1-yl]-4-hydroxy-2-pyrrolidinyl)methyl ester
aagctaagtaatcgtttctta

SEQ ID NO: 722 - RNA, 21 nt, synthetic construct
  source 1..21: mol_type = other RNA
  modified_base 1: mod_base = OTHER; note = 2'-O-methyladenosine-3'-phosphorothioate
  modified_base 2: mod_base = OTHER; note = 2'-O-methylguanosine-3'-phosphorothioate
  modified_base 3: mod_base = OTHER; note = 2'-O-methylcytidine-3'-phosphate
  modified_base 4: mod_base = OTHER; note = 2'-O-methyluridine-3'-phosphate
  modified_base 5: mod_base = OTHER; note = 2'-O-methyladenosine-3'-phosphate
  modified_base 6: mod_base = OTHER; note = 2'-O-methyladenosine-3'-phosphate
  modified_base 7: mod_base = OTHER; note = 2'-deoxy-2'-fluoroguanosine-3'-phosphate
  modified_base 8: mod_base = OTHER; note = 2'-O-methyluridine-3'-phosphate
  modified_base 9: mod_base = OTHER; note = 2'-deoxy-2'-fluoroadenosine-3'-phosphate
  modified_base 10: mod_base = OTHER; note = 2'-deoxy-2'-fluoroadenosine-3'-phosphate
  modified_base 11: mod_base = OTHER; note = 2'-deoxy-2'-fluorouridine-3'-phosphate
  modified_base 12: mod_base = OTHER; note = 2'-O-methylcytidine-3'-phosphate
  modified_base 13: mod_base = OTHER; note = 2'-O-methylguanosine-3'-phosphate
  modified_base 14: mod_base = OTHER; note = 2'-O-methyluridine-3'-phosphate
  modified_base 15: mod_base = OTHER; note = 2'-O-methyluridine-3'-phosphate
  modified_base 16: mod_base = OTHER; note = 2'-O-methyluridine-3'-phosphate
  modified_base 17: mod_base = OTHER; note = 2'-O-methylcytidine-3'-phosphate
  modified_base 18: mod_base = OTHER; note = 2'-O-methyluridine-3'-phosphate
  modified_base 19: mod_base = OTHER; note = 2'-O-methyluridine-3'-phosphate
  modified_base 20: mod_base = OTHER; note = 2'-O-methylcytidine-3'-phosphate
  modified_base 21: mod_base = OTHER; note = 2'-O-methyladenosine-3'-phosphate ((2S,4R)-1-[29-[[2-(acetylamino)-2-deoxy-beta-D-galactopyra nosyl]oxy]-14,14-bis[[3-[[3-[[5-[[2-(acetylamino)-2-deoxy-b eta-D-galactopyranosyl]oxy]-1-oxopentyl]amino]propyl]amino] -3-oxopropoxy]methyl]-1,12,19,25-tetraoxo-16-oxa-13,20,24-t riazanonacos-1-yl]-4-hydroxy-2-pyrrolidinyl)methyl ester
agctaagtaatcgtttcttca

SEQ ID NO: 723 - RNA, 21 nt, synthetic construct
  source 1..21: mol_type = other RNA
  modified_base 1: mod_base = OTHER; note = 2'-O-methylguanosine-3'-phosphorothioate
  modified_base 2: mod_base = OTHER; note = 2'-O-methylcytidine-3'-phosphorothioate
  modified_base 3: mod_base = OTHER; note = 2'-O-methyluridine-3'-phosphate
  modified_base 4: mod_base = OTHER; note = 2'-O-methyladenosine-3'-phosphate
  modified_base 5: mod_base = OTHER; note = 2'-O-methyladenosine-3'-phosphate
  modified_base 6: mod_base = OTHER; note = 2'-O-methylguanosine-3'-phosphate
  modified_base 7: mod_base = OTHER; note = 2'-deoxy-2'-fluorouridine-3'-phosphate
  modified_base 8: mod_base = OTHER; note = 2'-O-methyladenosine-3'-phosphate
  modified_base 9: mod_base = OTHER; note = 2'-deoxy-2'-fluoroadenosine-3'-phosphate
  modified_base 10: mod_base = OTHER; note = 2'-deoxy-2'-fluorouridine-3'-phosphate
  modified_base 11: mod_base = OTHER; note = 2'-deoxy-2'-fluorocytidine-3'-phosphate
  modified_base 12: mod_base = OTHER; note = 2'-O-methylguanosine-3'-phosphate
  modified_base 13: mod_base = OTHER; note = 2'-O-methyluridine-3'-phosphate
  modified_base 14: mod_base = OTHER; note = 2'-O-methyluridine-3'-phosphate
  modified_base 15: mod_base = OTHER; note = 2'-O-methyluridine-3'-phosphate
  modified_base 16: mod_base = OTHER; note = 2'-O-methylcytidine-3'-phosphate
  modified_base 17: mod_base = OTHER; note = 2'-O-methyluridine-3'-phosphate
  modified_base 18: mod_base = OTHER; note = 2'-O-methyluridine-3'-phosphate
  modified_base 19: mod_base = OTHER; note = 2'-O-methylcytidine-3'-phosphate
  modified_base 20: mod_base = OTHER; note = 2'-O-methylcytidine-3'-phosphate
  modified_base 21: mod_base = OTHER; note = 2'-O-methyladenosine-3'-phosphate ((2S,4R)-1-[29-[[2-(acetylamino)-2-deoxy-beta-D-galactopyra nosyl]oxy]-14,14-bis[[3-[[3-[[5-[[2-(acetylamino)-2-deoxy-b eta-D-galactopyranosyl]oxy]-1-oxopentyl]amino]propyl]amino] -3-oxopropoxy]methyl]-1,12,19,25-tetraoxo-16-oxa-13,20,24-t riazanonacos-1-yl]-4-hydroxy-2-pyrrolidinyl)methyl ester
gctaagtaatcgtttcttcca

SEQ ID NO: 724 - RNA, 21 nt, synthetic construct
  source 1..21: mol_type = other RNA
  modified_base 1: mod_base = OTHER; note = 2'-O-methylcytidine-3'-phosphorothioate
  modified_base 2: mod_base = OTHER; note = 2'-O-methyluridine-3'-phosphorothioate
  modified_base 3: mod_base = OTHER; note = 2'-O-methyladenosine-3'-phosphate
  modified_base 4: mod_base = OTHER; note = 2'-O-methyladenosine-3'-phosphate
  modified_base 5: mod_base = OTHER; note = 2'-O-methylguanosine-3'-phosphate
  modified_base 6: mod_base = OTHER; note = 2'-O-methyluridine-3'-phosphate
  modified_base 7: mod_base = OTHER; note = 2'-deoxy-2'-fluoroadenosine-3'-phosphate
  modified_base 8: mod_base = OTHER; note = 2'-O-methyladenosine-3'-phosphate
  modified_base 9: mod_base = OTHER; note = 2'-deoxy-2'-fluorouridine-3'-phosphate
  modified_base 10: mod_base = OTHER; note = 2'-deoxy-2'-fluorocytidine-3'-phosphate
  modified_base 11: mod_base = OTHER; note = 2'-deoxy-2'-fluoroguanosine-3'-phosphate
  modified_base 12: mod_base = OTHER; note = 2'-O-methyluridine-3'-phosphate
  modified_base 13: mod_base = OTHER; note = 2'-O-methyluridine-3'-phosphate
  modified_base 14: mod_base = OTHER; note = 2'-O-methyluridine-3'-phosphate
  modified_base 15: mod_base = OTHER; note = 2'-O-methylcytidine-3'-phosphate
  modified_base 16: mod_base = OTHER; note = 2'-O-methyluridine-3'-phosphate
  modified_base 17: mod_base = OTHER; note = 2'-O-methyluridine-3'-phosphate
  modified_base 18: mod_base = OTHER; note = 2'-O-methylcytidine-3'-phosphate
  modified_base 19: mod_base = OTHER; note = 2'-O-methylcytidine-3'-phosphate
  modified_base 20: mod_base = OTHER; note = 2'-O-methylcytidine-3'-phosphate
  modified_base 21: mod_base = OTHER; note = 2'-O-methyladenosine-3'-phosphate ((2S,4R)-1-[29-[[2-(acetylamino)-2-deoxy-beta-D-galactopyra nosyl]oxy]-14,14-bis[[3-[[3-[[5-[[2-(acetylamino)-2-deoxy-b eta-D-galactopyranosyl]oxy]-1-oxopentyl]amino]propyl]amino] -3-oxopropoxy]methyl]-1,12,19,25-tetraoxo-16-oxa-13,20,24-t riazanonacos-1-yl]-4-hydroxy-2-pyrrolidinyl)methyl ester
ctaagtaatcgtttcttccca

SEQ ID NO: 725 - RNA, 21 nt, synthetic construct
  source 1..21: mol_type = other RNA
  modified_base 1: mod_base = OTHER; note = 2'-O-methyluridine-3'-phosphorothioate
  modified_base 2: mod_base = OTHER; note = 2'-O-methyladenosine-3'-phosphorothioate
  modified_base 3: mod_base = OTHER; note = 2'-O-methyladenosine-3'-phosphate
  modified_base 4: mod_base = OTHER; note = 2'-O-methyluridine-3'-phosphate
  modified_base 5: mod_base = OTHER; note = 2'-O-methylcytidine-3'-phosphate
  modified_base 6: mod_base = OTHER; note = 2'-O-methylguanosine-3'-phosphate
  modified_base 7: mod_base = OTHER; note = 2'-deoxy-2'-fluorouridine-3'-phosphate
  modified_base 8: mod_base = OTHER; note = 2'-O-methyluridine-3'-phosphate
  modified_base 9: mod_base = OTHER; note = 2'-deoxy-2'-fluorouridine-3'-phosphate
  modified_base 10: mod_base = OTHER; note = 2'-deoxy-2'-fluorocytidine-3'-phosphate
  modified_base 11: mod_base = OTHER; note = 2'-deoxy-2'-fluorouridine-3'-phosphate
  modified_base 12: mod_base = OTHER; note = 2'-O-methyluridine-3'-phosphate
  modified_base 13: mod_base = OTHER; note = 2'-O-methylcytidine-3'-phosphate
  modified_base 14: mod_base = OTHER; note = 2'-O-methylcytidine-3'-phosphate
  modified_base 15: mod_base = OTHER; note = 2'-O-methylcytidine-3'-phosphate
  modified_base 16: mod_base = OTHER; note = 2'-O-methyluridine-3'-phosphate
  modified_base 17: mod_base = OTHER; note = 2'-O-methyluridine-3'-phosphate
  modified_base 18: mod_base = OTHER; note = 2'-O-methyladenosine-3'-phosphate
  modified_base 19: mod_base = OTHER; note = 2'-O-methylcytidine-3'-phosphate
  modified_base 20: mod_base = OTHER; note = 2'-O-methylguanosine-3'-phosphate
  modified_base 21: mod_base = OTHER; note = 2'-O-methyladenosine-3'-phosphate ((2S,4R)-1-[29-[[2-(acetylamino)-2-deoxy-beta-D-galactopyra nosyl]oxy]-14,14-bis[[3-[[3-[[5-[[2-(acetylamino)-2-deoxy-b eta-D-galactopyranosyl]oxy]-1-oxopentyl]amino]propyl]amino] -3-oxopropoxy]methyl]-1,12,19,25-tetraoxo-16-oxa-13,20,24-t riazanonacos-1-yl]-4-hydroxy-2-pyrrolidinyl)methyl ester
taatcgtttcttcccttacga

SEQ ID NO: 726 - RNA, 21 nt, synthetic construct
  source 1..21: mol_type = other RNA
  modified_base 1: mod_base = OTHER; note = 2'-O-methyladenosine-3'-phosphorothioate
  modified_base 2: mod_base = OTHER; note = 2'-O-methyladenosine-3'-phosphorothioate
  modified_base 3: mod_base = OTHER; note = 2'-O-methyluridine-3'-phosphate
  modified_base 4: mod_base = OTHER; note = 2'-O-methylcytidine-3'-phosphate
  modified_base 5: mod_base = OTHER; note = 2'-O-methylguanosine-3'-phosphate
  modified_base 6: mod_base = OTHER; note = 2'-O-methyluridine-3'-phosphate
  modified_base 7: mod_base = OTHER; note = 2'-deoxy-2'-fluorouridine-3'-phosphate
  modified_base 8: mod_base = OTHER; note = 2'-O-methyluridine-3'-phosphate
  modified_base 9: mod_base = OTHER; note = 2'-deoxy-2'-fluorocytidine-3'-phosphate
  modified_base 10: mod_base = OTHER; note = 2'-deoxy-2'-fluorouridine-3'-phosphate
  modified_base 11: mod_base = OTHER; note = 2'-deoxy-2'-fluorouridine-3'-phosphate
  modified_base 12: mod_base = OTHER; note = 2'-O-methylcytidine-3'-phosphate
  modified_base 13: mod_base = OTHER; note = 2'-O-methylcytidine-3'-phosphate
  modified_base 14: mod_base = OTHER; note = 2'-O-methylcytidine-3'-phosphate
  modified_base 15: mod_base = OTHER; note = 2'-O-methyluridine-3'-phosphate
  modified_base 16: mod_base = OTHER; note = 2'-O-methyluridine-3'-phosphate
  modified_base 17: mod_base = OTHER; note = 2'-O-methyladenosine-3'-phosphate
  modified_base 18: mod_base = OTHER; note = 2'-O-methylcytidine-3'-phosphate
  modified_base 19: mod_base = OTHER; note = 2'-O-methylguanosine-3'-phosphate
  modified_base 20: mod_base = OTHER; note = 2'-O-methyladenosine-3'-phosphate
  modified_base 21: mod_base = OTHER; note = 2'-O-methyladenosine-3'-phosphate ((2S,4R)-1-[29-[[2-(acetylamino)-2-deoxy-beta-D-galactopyra nosyl]oxy]-14,14-bis[[3-[[3-[[5-[[2-(acetylamino)-2-deoxy-b eta-D-galactopyranosyl]oxy]-1-oxopentyl]amino]propyl]amino] -3-oxopropoxy]methyl]-1,12,19,25-tetraoxo-16-oxa-13,20,24-t riazanonacos-1-yl]-4-hydroxy-2-pyrrolidinyl)methyl ester
aatcgtttcttcccttacgaa

SEQ ID NO: 727 - RNA, 21 nt, synthetic construct
  source 1..21: mol_type = other RNA
  modified_base 1: mod_base = OTHER; note = 2'-O-methylcytidine-3'-phosphorothioate
  modified_base 2: mod_base = OTHER; note = 2'-O-methylcytidine-3'-phosphorothioate
  modified_base 3: mod_base = OTHER; note = 2'-O-methyluridine-3'-phosphate
  modified_base 4: mod_base = OTHER; note = 2'-O-methyluridine-3'-phosphate
  modified_base 5: mod_base = OTHER; note = 2'-O-methyladenosine-3'-phosphate
  modified_base 6: mod_base = OTHER; note = 2'-O-methylcytidine-3'-phosphate
  modified_base 7: mod_base = OTHER; note = 2'-deoxy-2'-fluoroguanosine-3'-phosphate
  modified_base 8: mod_base = OTHER; note = 2'-O-methyladenosine-3'-phosphate
  modified_base 9: mod_base = OTHER; note = 2'-deoxy-2'-fluorocytidine-3'-phosphate
  modified_base 10: mod_base = OTHER; note = 2'-deoxy-2'-fluoroguanosine-3'-phosphate
  modified_base 11: mod_base = OTHER; note = 2'-deoxy-2'-fluoroadenosine-3'-phosphate
  modified_base 12: mod_base = OTHER; note = 2'-O-methyladenosine-3'-phosphate
  modified_base 13: mod_base = OTHER; note = 2'-O-methyladenosine-3'-phosphate
  modified_base 14: mod_base = OTHER; note = 2'-O-methyluridine-3'-phosphate
  modified_base 15: mod_base = OTHER; note = 2'-O-methylcytidine-3'-phosphate
  modified_base 16: mod_base = OTHER; note = 2'-O-methylguanosine-3'-phosphate
  modified_base 17: mod_base = OTHER; note = 2'-O-methyladenosine-3'-phosphate
  modified_base 18: mod_base = OTHER; note = 2'-O-methylguanosine-3'-phosphate
  modified_base 19: mod_base = OTHER; note = 2'-O-methyladenosine-3'-phosphate
  modified_base 20: mod_base = OTHER; note = 2'-O-methylcytidine-3'-phosphate
  modified_base 21: mod_base = OTHER; note = 2'-O-methyladenosine-3'-phosphate ((2S,4R)-1-[29-[[2-(acetylamino)-2-deoxy-beta-D-galactopyra nosyl]oxy]-14,14-bis[[3-[[3-[[5-[[2-(acetylamino)-2-deoxy-b eta-D-galactopyranosyl]oxy]-1-oxopentyl]amino]propyl]amino] -3-oxopropoxy]methyl]-1,12,19,25-tetraoxo-16-oxa-13,20,24-t riazanonacos-1-yl]-4-hydroxy-2-pyrrolidinyl)methyl ester
ccttacgacgaaatcgagaca

SEQ ID NO: 728 - RNA, 21 nt, synthetic construct
  source 1..21: mol_type = other RNA
  modified_base 1: mod_base = OTHER; note = 2'-O-methyladenosine-3'-phosphorothioate
  modified_base 2: mod_base = OTHER; note = 2'-O-methylcytidine-3'-phosphorothioate
  modified_base 3: mod_base = OTHER; note = 2'-O-methylguanosine-3'-phosphate
  modified_base 4: mod_base = OTHER; note = 2'-O-methyladenosine-3'-phosphate
  modified_base 5: mod_base = OTHER; note = 2'-O-methylguanosine-3'-phosphate
  modified_base 6: mod_base = OTHER; note = 2'-O-methylcytidine-3'-phosphate
  modified_base 7: mod_base = OTHER; note = 2'-deoxy-2'-fluorouridine-3'-phosphate
  modified_base 8: mod_base = OTHER; note = 2'-O-methylguanosine-3'-phosphate
  modified_base 9: mod_base = OTHER; note = 2'-deoxy-2'-fluorocytidine-3'-phosphate
  modified_base 10: mod_base = OTHER; note = 2'-deoxy-2'-fluoroadenosine-3'-phosphate
  modified_base 11: mod_base = OTHER; note = 2'-deoxy-2'-fluoroguanosine-3'-phosphate
  modified_base 12: mod_base = OTHER; note = 2'-O-methyluridine-3'-phosphate
  modified_base 13: mod_base = OTHER; note = 2'-O-methyluridine-3'-phosphate
  modified_base 14: mod_base = OTHER; note = 2'-O-methyluridine-3'-phosphate
  modified_base 15: mod_base = OTHER; note = 2'-O-methylguanosine-3'-phosphate
  modified_base 16: mod_base = OTHER; note = 2'-O-methylguanosine-3'-phosphate
  modified_base 17: mod_base = OTHER; note = 2'-O-methyluridine-3'-phosphate
  modified_base 18: mod_base = OTHER; note = 2'-O-methyluridine-3'-phosphate
  modified_base 19: mod_base = OTHER; note = 2'-O-methyladenosine-3'-phosphate
  modified_base 20: mod_base = OTHER; note = 2'-O-methyluridine-3'-phosphate
  modified_base 21: mod_base = OTHER; note = 2'-O-methyladenosine-3'-phosphate ((2S,4R)-1-[29-[[2-(acetylamino)-2-deoxy-beta-D-galactopyra nosyl]oxy]-14,14-bis[[3-[[3-[[5-[[2-(acetylamino)-2-deoxy-b eta-D-galactopyranosyl]oxy]-1-oxopentyl]amino]propyl]amino] -3-oxopropoxy]methyl]-1,12,19,25-tetraoxo-16-oxa-13,20,24-t riazanonacos-1-yl]-4-hydroxy-2-pyrrolidinyl)methyl ester
acgagctgcagtttggttata

SEQ ID NO: 729 - RNA, 21 nt, synthetic construct
  source 1..21: mol_type = other RNA
  modified_base 1: mod_base = OTHER; note = 2'-O-methylguanosine-3'-phosphorothioate
  modified_base 2: mod_base = OTHER; note = 2'-O-methyladenosine-3'-phosphorothioate
  modified_base 3: mod_base = OTHER; note = 2'-O-methylguanosine-3'-phosphate
  modified_base 4: mod_base = OTHER; note = 2'-O-methylcytidine-3'-phosphate
  modified_base 5: mod_base = OTHER; note = 2'-O-methyluridine-3'-phosphate
  modified_base 6: mod_base = OTHER; note = 2'-O-methylguanosine-3'-phosphate
  modified_base 7: mod_base = OTHER; note = 2'-deoxy-2'-fluorocytidine-3'-phosphate
  modified_base 8: mod_base = OTHER; note = 2'-O-methyladenosine-3'-phosphate
  modified_base 9: mod_base = OTHER; note = 2'-deoxy-2'-fluoroguanosine-3'-phosphate
  modified_base 10: mod_base = OTHER; note = 2'-deoxy-2'-fluorouridine-3'-phosphate
  modified_base 11: mod_base = OTHER; note = 2'-deoxy-2'-fluorouridine-3'-phosphate
  modified_base 12: mod_base = OTHER; note = 2'-O-methyluridine-3'-phosphate
  modified_base 13: mod_base = OTHER; note = 2'-O-methylguanosine-3'-phosphate
  modified_base 14: mod_base = OTHER; note = 2'-O-methylguanosine-3'-phosphate
  modified_base 15: mod_base = OTHER; note = 2'-O-methyluridine-3'-phosphate
  modified_base 16: mod_base = OTHER; note = 2'-O-methyluridine-3'-phosphate
  modified_base 17: mod_base = OTHER; note = 2'-O-methyladenosine-3'-phosphate
  modified_base 18: mod_base = OTHER; note = 2'-O-methyluridine-3'-phosphate
  modified_base 19: mod_base = OTHER; note = 2'-O-methylguanosine-3'-phosphate
  modified_base 20: mod_base = OTHER; note = 2'-O-methyladenosine-3'-phosphate
  modified_base 21: mod_base = OTHER; note = 2'-O-methyladenosine-3'-phosphate ((2S,4R)-1-[29-[[2-(acetylamino)-2-deoxy-beta-D-galactopyra nosyl]oxy]-14,14-bis[[3-[[3-[[5-[[2-(acetylamino)-2-deoxy-b eta-D-galactopyranosyl]oxy]-1-oxopentyl]amino]propyl]amino] -3-oxopropoxy]methyl]-1,12,19,25-tetraoxo-16-oxa-13,20,24-t riazanonacos-1-yl]-4-hydroxy-2-pyrrolidinyl)methyl ester
gagctgcagtttggttatgaa

SEQ ID NO: 730 - RNA, 21 nt, synthetic construct
  source 1..21: mol_type = other RNA
  modified_base 1: mod_base = OTHER; note = 2'-O-methyluridine-3'-phosphorothioate
  modified_base 2: mod_base = OTHER; note = 2'-O-methyladenosine-3'-phosphorothioate
  modified_base 3: mod_base = OTHER; note = 2'-O-methylcytidine-3'-phosphate
  modified_base 4: mod_base = OTHER; note = 2'-O-methyluridine-3'-phosphate
  modified_base 5: mod_base = OTHER; note = 2'-O-methylcytidine-3'-phosphate
  modified_base 6: mod_base = OTHER; note = 2'-O-methyladenosine-3'-phosphate
  modified_base 7: mod_base = OTHER; note = 2'-deoxy-2'-fluorocytidine-3'-phosphate
  modified_base 8: mod_base = OTHER; note = 2'-O-methyladenosine-3'-phosphate
  modified_base 9: mod_base = OTHER; note = 2'-deoxy-2'-fluorouridine-3'-phosphate
  modified_base 10: mod_base = OTHER; note = 2'-deoxy-2'-fluoroguanosine-3'-phosphate
  modified_base 11: mod_base = OTHER; note = 2'-deoxy-2'-fluoroadenosine-3'-phosphate
  modified_base 12: mod_base = OTHER; note = 2'-O-methyladenosine-3'-phosphate
  modified_base 13: mod_base = OTHER; note = 2'-O-methylcytidine-3'-phosphate
  modified_base 14: mod_base = OTHER; note = 2'-O-methyluridine-3'-phosphate
  modified_base 15: mod_base = OTHER; note = 2'-O-methylguanosine-3'-phosphate
  modified_base 16: mod_base = OTHER; note = 2'-O-methyluridine-3'-phosphate
  modified_base 17: mod_base = OTHER; note = 2'-O-methylguanosine-3'-phosphate
  modified_base 18: mod_base = OTHER; note = 2'-O-methyladenosine-3'-phosphate
  modified_base 19: mod_base = OTHER; note = 2'-O-methyladenosine-3'-phosphate
  modified_base 20: mod_base = OTHER; note = 2'-O-methylguanosine-3'-phosphate
  modified_base 21: mod_base = OTHER; note = 2'-O-methyladenosine-3'-phosphate ((2S,4R)-1-[29-[[2-(acetylamino)-2-deoxy-beta-D-galactopyra nosyl]oxy]-14,14-bis[[3-[[3-[[5-[[2-(acetylamino)-2-deoxy-b eta-D-galactopyranosyl]oxy]-1-oxopentyl]amino]propyl]amino] -3-oxopropoxy]methyl]-1,12,19,25-tetraoxo-16-oxa-13,20,24-t riazanonacos-1-yl]-4-hydroxy-2-pyrrolidinyl)methyl ester
tactcacatgaactgtgaaga

SEQ ID NO: 731 - RNA, 21 nt, synthetic construct
  source 1..21: mol_type = other RNA
  modified_base 1: mod_base = OTHER; note = 2'-O-methylcytidine-3'-phosphorothioate
  modified_base 2: mod_base = OTHER; note = 2'-O-methyladenosine-3'-phosphorothioate
  modified_base 3: mod_base = OTHER; note = 2'-O-methyluridine-3'-phosphate
  modified_base 4: mod_base = OTHER; note = 2'-O-methylguanosine-3'-phosphate
  modified_base 5: mod_base = OTHER; note = 2'-O-methyladenosine-3'-phosphate
  modified_base 6: mod_base = OTHER; note = 2'-O-methyladenosine-3'-phosphate
  modified_base 7: mod_base = OTHER; note = 2'-deoxy-2'-fluorocytidine-3'-phosphate
  modified_base 8: mod_base = OTHER; note = 2'-O-methyluridine-3'-phosphate
  modified_base 9: mod_base = OTHER; note = 2'-deoxy-2'-fluoroguanosine-3'-phosphate
  modified_base 10: mod_base = OTHER; note = 2'-deoxy-2'-fluorouridine-3'-phosphate
  modified_base 11: mod_base = OTHER; note = 2'-deoxy-2'-fluoroguanosine-3'-phosphate
  modified_base 12: mod_base = OTHER; note = 2'-O-methyladenosine-3'-phosphate
  modified_base 13: mod_base = OTHER; note = 2'-O-methyladenosine-3'-phosphate
  modified_base 14: mod_base = OTHER; note = 2'-O-methylguanosine-3'-phosphate
  modified_base 15: mod_base = OTHER; note = 2'-O-methyladenosine-3'-phosphate
  modified_base 16: mod_base = OTHER; note = 2'-O-methyluridine-3'-phosphate
  modified_base 17: mod_base = OTHER; note = 2'-O-methyladenosine-3'-phosphate
  modified_base 18: mod_base = OTHER; note = 2'-O-methyluridine-3'-phosphate
  modified_base 19: mod_base = OTHER; note = 2'-O-methyluridine-3'-phosphate
  modified_base 20: mod_base = OTHER; note = 2'-O-methylguanosine-3'-phosphate
  modified_base 21: mod_base = OTHER; note = 2'-O-methyladenosine-3'-phosphate ((2S,4R)-1-[29-[[2-(acetylamino)-2-deoxy-beta-D-galactopyra nosyl]oxy]-14,14-bis[[3-[[3-[[5-[[2-(acetylamino)-2-deoxy-b eta-D-galactopyranosyl]oxy]-1-oxopentyl]amino]propyl]amino] -3-oxopropoxy]methyl]-1,12,19,25-tetraoxo-16-oxa-13,20,24-t riazanonacos-1-yl]-4-hydroxy-2-pyrrolidinyl)methyl ester
catgaactgtgaagatattga

SEQ ID NO: 732 - RNA, 21 nt, synthetic construct
  source 1..21: mol_type = other RNA
  modified_base 1: mod_base = OTHER; note = 2'-O-methyladenosine-3'-phosphorothioate
  modified_base 2: mod_base = OTHER; note = 2'-O-methyluridine-3'-phosphorothioate
  modified_base 3: mod_base = OTHER; note = 2'-O-methylguanosine-3'-phosphate
  modified_base 4: mod_base = OTHER; note = 2'-O-methyladenosine-3'-phosphate
  modified_base 5: mod_base = OTHER; note = 2'-O-methyladenosine-3'-phosphate
  modified_base 6: mod_base = OTHER; note = 2'-O-methylcytidine-3'-phosphate
  modified_base 7: mod_base = OTHER; note = 2'-deoxy-2'-fluorouridine-3'-phosphate
  modified_base 8: mod_base = OTHER; note = 2'-O-methylguanosine-3'-phosphate
  modified_base 9: mod_base = OTHER; note = 2'-deoxy-2'-fluorouridine-3'-phosphate
  modified_base 10: mod_base = OTHER; note = 2'-deoxy-2'-fluoroguanosine-3'-phosphate
  modified_base 11: mod_base = OTHER; note = 2'-deoxy-2'-fluoroadenosine-3'-phosphate
  modified_base 12: mod_base = OTHER; note = 2'-O-methyladenosine-3'-phosphate
  modified_base 13: mod_base = OTHER; note = 2'-O-methylguanosine-3'-phosphate
  modified_base 14: mod_base = OTHER; note = 2'-O-methyladenosine-3'-phosphate
  modified_base 15: mod_base = OTHER; note = 2'-O-methyluridine-3'-phosphate
  modified_base 16: mod_base = OTHER; note = 2'-O-methyladenosine-3'-phosphate
  modified_base 17: mod_base = OTHER; note = 2'-O-methyluridine-3'-phosphate
  modified_base 18: mod_base = OTHER; note = 2'-O-methyluridine-3'-phosphate
  modified_base 19: mod_base = OTHER; note = 2'-O-methylguanosine-3'-phosphate
  modified_base 20: mod_base = OTHER; note = 2'-O-methylcytidine-3'-phosphate
  modified_base 21: mod_base = OTHER; note = 2'-O-methyladenosine-3'-phosphate ((2S,4R)-1-[29-[[2-(acetylamino)-2-deoxy-beta-D-galactopyra nosyl]oxy]-14,14-bis[[3-[[3-[[5-[[2-(acetylamino)-2-deoxy-b eta-D-galactopyranosyl]oxy]-1-oxopentyl]amino]propyl]amino] -3-oxopropoxy]methyl]-1,12,19,25-tetraoxo-16-oxa-13,20,24-t riazanonacos-1-yl]-4-hydroxy-2-pyrrolidinyl)methyl ester
atgaactgtgaagatattgca

SEQ ID NO: 733 - RNA, 21 nt, synthetic construct
  source 1..21: mol_type = other RNA
  modified_base 1: mod_base = OTHER; note = 2'-O-methyluridine-3'-phosphorothioate
  modified_base 2: mod_base = OTHER; note = 2'-O-methylguanosine-3'-phosphorothioate
  modified_base 3: mod_base = OTHER; note = 2'-O-methyladenosine-3'-phosphate
  modified_base 4: mod_base = OTHER; note = 2'-O-methyladenosine-3'-phosphate
  modified_base 5: mod_base = OTHER; note = 2'-O-methylcytidine-3'-phosphate
  modified_base 6: mod_base = OTHER; note = 2'-O-methyluridine-3'-phosphate
  modified_base 7: mod_base = OTHER; note = 2'-deoxy-2'-fluoroguanosine-3'-phosphate
  modified_base 8: mod_base = OTHER; note = 2'-O-methyluridine-3'-phosphate
  modified_base 9: mod_base = OTHER; note = 2'-deoxy-2'-fluoroguanosine-3'-phosphate
  modified_base 10: mod_base = OTHER; note = 2'-deoxy-2'-fluoroadenosine-3'-phosphate
  modified_base 11: mod_base = OTHER; note = 2'-deoxy-2'-fluoroadenosine-3'-phosphate
  modified_base 12: mod_base = OTHER; note = 2'-O-methylguanosine-3'-phosphate
  modified_base 13: mod_base = OTHER; note = 2'-O-methyladenosine-3'-phosphate
  modified_base 14: mod_base = OTHER; note = 2'-O-methyluridine-3'-phosphate
  modified_base 15: mod_base = OTHER; note = 2'-O-methyladenosine-3'-phosphate
  modified_base 16: mod_base = OTHER; note = 2'-O-methyluridine-3'-phosphate
  modified_base 17: mod_base = OTHER; note = 2'-O-methyluridine-3'-phosphate
  modified_base 18: mod_base = OTHER; note = 2'-O-methylguanosine-3'-phosphate
  modified_base 19: mod_base = OTHER; note = 2'-O-methylcytidine-3'-phosphate
  modified_base 20: mod_base = OTHER; note = 2'-O-methylcytidine-3'-phosphate
  modified_base 21: mod_base = OTHER; note = 2'-O-methyladenosine-3'-phosphate ((2S,4R)-1-[29-[[2-(acetylamino)-2-deoxy-beta-D-galactopyra nosyl]oxy]-14,14-bis[[3-[[3-[[5-[[2-(acetylamino)-2-deoxy-b eta-D-galactopyranosyl]oxy]-1-oxopentyl]amino]propyl]amino] -3-oxopropoxy]methyl]-1,12,19,25-tetraoxo-16-oxa-13,20,24-t riazanonacos-1-yl]-4-hydroxy-2-pyrrolidinyl)methyl ester
tgaactgtgaagatattgcca

SEQ ID NO: 734 - RNA, 21 nt, synthetic construct
  source 1..21: mol_type = other RNA
  modified_base 1: mod_base = OTHER; note = 2'-O-methylcytidine-3'-phosphorothioate
  modified_base 2: mod_base = OTHER; note = 2'-O-methyluridine-3'-phosphorothioate
  modified_base 3: mod_base = OTHER; note = 2'-O-methylguanosine-3'-phosphate
  modified_base 4: mod_base = OTHER; note = 2'-O-methyluridine-3'-phosphate
  modified_base 5: mod_base = OTHER; note = 2'-O-methylguanosine-3'-phosphate
  modified_base 6: mod_base = OTHER; note = 2'-O-methyladenosine-3'-phosphate
  modified_base 7: mod_base = OTHER; note = 2'-deoxy-2'-fluoroadenosine-3'-phosphate
  modified_base 8: mod_base = OTHER; note = 2'-O-methylguanosine-3'-phosphate
  modified_base 9: mod_base = OTHER; note = 2'-deoxy-2'-fluoroadenosine-3'-phosphate
  modified_base 10: mod_base = OTHER; note = 2'-deoxy-2'-fluorouridine-3'-phosphate
  modified_base 11: mod_base = OTHER; note = 2'-deoxy-2'-fluoroadenosine-3'-phosphate
  modified_base 12: mod_base = OTHER; note = 2'-O-methyluridine-3'-phosphate
  modified_base 13: mod_base = OTHER; note = 2'-O-methyluridine-3'-phosphate
  modified_base 14: mod_base = OTHER; note = 2'-O-methylguanosine-3'-phosphate
  modified_base 15: mod_base = OTHER; note = 2'-O-methylcytidine-3'-phosphate
  modified_base 16: mod_base = OTHER; note = 2'-O-methylcytidine-3'-phosphate
  modified_base 17: mod_base = OTHER; note = 2'-O-methyladenosine-3'-phosphate
  modified_base 18: mod_base = OTHER; note = 2'-O-methyluridine-3'-phosphate
  modified_base 19: mod_base = OTHER; note = 2'-O-methylguanosine-3'-phosphate
  modified_base 20: mod_base = OTHER; note = 2'-O-methyladenosine-3'-phosphate
  modified_base 21: mod_base = OTHER; note = 2'-O-methyladenosine-3'-phosphate ((2S,4R)-1-[29-[[2-(acetylamino)-2-deoxy-beta-D-galactopyra nosyl]oxy]-14,14-bis[[3-[[3-[[5-[[2-(acetylamino)-2-deoxy-b eta-D-galactopyranosyl]oxy]-1-oxopentyl]amino]propyl]amino] -3-oxopropoxy]methyl]-1,12,19,25-tetraoxo-16-oxa-13,20,24-t riazanonacos-1-yl]-4-hydroxy-2-pyrrolidinyl)methyl ester
ctgtgaagatattgccatgaa

SEQ ID NO: 735 - RNA, 21 nt, synthetic construct
  source 1..21: mol_type = other RNA
  modified_base 1: mod_base = OTHER; note = 2'-O-methylguanosine-3'-phosphorothioate
  modified_base 2: mod_base = OTHER; note = 2'-O-methyluridine-3'-phosphorothioate
  modified_base 3: mod_base = OTHER; note = 2'-O-methylguanosine-3'-phosphate
  modified_base 4: mod_base = OTHER; note = 2'-O-methyladenosine-3'-phosphate
  modified_base 5: mod_base = OTHER; note = 2'-O-methyladenosine-3'-phosphate
  modified_base 6: mod_base = OTHER; note = 2'-O-methylguanosine-3'-phosphate
  modified_base 7: mod_base = OTHER; note = 2'-deoxy-2'-fluoroadenosine-3'-phosphate
  modified_base 8: mod_base = OTHER; note = 2'-O-methyluridine-3'-phosphate
  modified_base 9: mod_base = OTHER; note = 2'-deoxy-2'-fluoroadenosine-3'-phosphate
  modified_base 10: mod_base = OTHER; note = 2'-deoxy-2'-fluorouridine-3'-phosphate
  modified_base 11: mod_base = OTHER; note = 2'-deoxy-2'-fluorouridine-3'-phosphate
  modified_base 12: mod_base = OTHER; note = 2'-O-methylguanosine-3'-phosphate
  modified_base 13: mod_base = OTHER; note = 2'-O-methylcytidine-3'-phosphate
  modified_base 14: mod_base = OTHER; note = 2'-O-methylcytidine-3'-phosphate
  modified_base 15: mod_base = OTHER; note = 2'-O-methyladenosine-3'-phosphate
  modified_base 16: mod_base = OTHER; note = 2'-O-methyluridine-3'-phosphate
  modified_base 17: mod_base = OTHER; note = 2'-O-methylguanosine-3'-phosphate
  modified_base 18: mod_base = OTHER; note = 2'-O-methyladenosine-3'-phosphate
  modified_base 19: mod_base = OTHER; note = 2'-O-methyladenosine-3'-phosphate
  modified_base 20: mod_base = OTHER; note = 2'-O-methyluridine-3'-phosphate
  modified_base 21: mod_base = OTHER; note = 2'-O-methyladenosine-3'-phosphate ((2S,4R)-1-[29-[[2-(acetylamino)-2-deoxy-beta-D-galactopyra nosyl]oxy]-14,14-bis[[3-[[3-[[5-[[2-(acetylamino)-2-deoxy-b eta-D-galactopyranosyl]oxy]-1-oxopentyl]amino]propyl]amino] -3-oxopropoxy]methyl]-1,12,19,25-tetraoxo-16-oxa-13,20,24-t riazanonacos-1-yl]-4-hydroxy-2-pyrrolidinyl)methyl ester
gtgaagatattgccatgaata

SEQ ID NO: 736 - RNA, 21 nt, synthetic construct
  source 1..21: mol_type = other RNA
  modified_base 1: mod_base = OTHER; note = 2'-O-methylguanosine-3'-phosphorothioate
  modified_base 2: mod_base = OTHER; note = 2'-O-methylguanosine-3'-phosphorothioate
  modified_base 3: mod_base = OTHER; note = 2'-O-methyladenosine-3'-phosphate
  modified_base 4: mod_base = OTHER; note = 2'-O-methyladenosine-3'-phosphate
  modified_base 5: mod_base = OTHER; note = 2'-O-methyladenosine-3'-phosphate
  modified_base 6: mod_base = OTHER; note = 2'-O-methylguanosine-3'-phosphate
  modified_base 7: mod_base = OTHER; note = 2'-deoxy-2'-fluorocytidine-3'-phosphate
  modified_base 8: mod_base = OTHER; note = 2'-O-methyluridine-3'-phosphate
  modified_base 9: mod_base = OTHER; note = 2'-deoxy-2'-fluoroguanosine-3'-phosphate
  modified_base 10: mod_base = OTHER; note = 2'-deoxy-2'-fluorouridine-3'-phosphate
  modified_base 11: mod_base = OTHER; note = 2'-deoxy-2'-fluorocytidine-3'-phosphate
  modified_base 12: mod_base = OTHER; note = 2'-O-methyladenosine-3'-phosphate
  modified_base 13: mod_base = OTHER; note = 2'-O-methyluridine-3'-phosphate
  modified_base 14: mod_base = OTHER; note = 2'-O-methylcytidine-3'-phosphate
  modified_base 15: mod_base = OTHER; note = 2'-O-methyladenosine-3'-phosphate
  modified_base 16: mod_base = OTHER; note = 2'-O-methyladenosine-3'-phosphate
  modified_base 17: mod_base = OTHER; note = 2'-O-methylguanosine-3'-phosphate
  modified_base 18: mod_base = OTHER; note = 2'-O-methylguanosine-3'-phosphate
  modified_base 19: mod_base = OTHER; note = 2'-O-methyluridine-3'-phosphate
  modified_base 20: mod_base = OTHER; note = 2'-O-methyladenosine-3'-phosphate
  modified_base 21: mod_base = OTHER; note = 2'-O-methyladenosine-3'-phosphate ((2S,4R)-1-[29-[[2-(acetylamino)-2-deoxy-beta-D-galactopyra nosyl]oxy]-14,14-bis[[3-[[3-[[5-[[2-(acetylamino)-2-deoxy-b eta-D-galactopyranosyl]oxy]-1-oxopentyl]amino]propyl]amino] -3-oxopropoxy]methyl]-1,12,19,25-tetraoxo-16-oxa-13,20,24-t riazanonacos-1-yl]-4-hydroxy-2-pyrrolidinyl)methyl ester
ggaaagctgtcatcaaggtaa

SEQ ID NO: 737 - RNA, 21 nt, synthetic construct
  source 1..21: mol_type = other RNA
  modified_base 1: mod_base = OTHER; note = 2'-O-methylguanosine-3'-phosphorothioate
  modified_base 2: mod_base = OTHER; note = 2'-O-methyladenosine-3'-phosphorothioate
  modified_base 3: mod_base = OTHER; note = 2'-O-methyladenosine-3'-phosphate
  modified_base 4: mod_base = OTHER; note = 2'-O-methyladenosine-3'-phosphate
  modified_base 5: mod_base = OTHER; note = 2'-O-methylguanosine-3'-phosphate
  modified_base 6: mod_base = OTHER; note = 2'-O-methylcytidine-3'-phosphate
  modified_base 7: mod_base = OTHER; note = 2'-deoxy-2'-fluorouridine-3'-phosphate
  modified_base 8: mod_base = OTHER; note = 2'-O-methylguanosine-3'-phosphate
  modified_base 9: mod_base = OTHER; note = 2'-deoxy-2'-fluorouridine-3'-phosphate
  modified_base 10: mod_base = OTHER; note = 2'-deoxy-2'-fluorocytidine-3'-phosphate
  modified_base 11: mod_base = OTHER; note = 2'-deoxy-2'-fluoroadenosine-3'-phosphate
  modified_base 12: mod_base = OTHER; note = 2'-O-methyluridine-3'-phosphate
  modified_base 13: mod_base = OTHER; note = 2'-O-methylcytidine-3'-phosphate
  modified_base 14: mod_base = OTHER; note = 2'-O-methyladenosine-3'-phosphate
  modified_base 15: mod_base = OTHER; note = 2'-O-methyladenosine-3'-phosphate
  modified_base 16: mod_base = OTHER; note = 2'-O-methylguanosine-3'-phosphate
  modified_base 17: mod_base = OTHER; note = 2'-O-methylguanosine-3'-phosphate
  modified_base 18: mod_base = OTHER; note = 2'-O-methyluridine-3'-phosphate
  modified_base 19: mod_base = OTHER; note = 2'-O-methyladenosine-3'-phosphate
  modified_base 20: mod_base = OTHER; note = 2'-O-methyladenosine-3'-phosphate
  modified_base 21: mod_base = OTHER; note = 2'-O-methyladenosine-3'-phosphate ((2S,4R)-1-[29-[[2-(acetylamino)-2-deoxy-beta-D-galactopyra nosyl]oxy]-14,14-bis[[3-[[3-[[5-[[2-(acetylamino)-2-deoxy-b eta-D-galactopyranosyl]oxy]-1-oxopentyl]amino]propyl]amino] -3-oxopropoxy]methyl]-1,12,19,25-tetraoxo-16-oxa-13,20,24-t riazanonacos-1-yl]-4-hydroxy-2-pyrrolidinyl)methyl ester
gaaagctgtcatcaaggtaaa

SEQ ID NO: 738 - RNA, 21 nt, synthetic construct
  source 1..21: mol_type = other RNA
  modified_base 1: mod_base = OTHER; note = 2'-O-methyladenosine-3'-phosphorothioate
  modified_base 2: mod_base = OTHER; note = 2'-O-methyladenosine-3'-phosphorothioate
  modified_base 3: mod_base = OTHER; note = 2'-O-methyladenosine-3'-phosphate
  modified_base 4: mod_base = OTHER; note = 2'-O-methylguanosine-3'-phosphate
  modified_base 5: mod_base = OTHER; note = 2'-O-methylcytidine-3'-phosphate
  modified_base 6: mod_base = OTHER; note = 2'-O-methyluridine-3'-phosphate
  modified_base 7: mod_base = OTHER; note = 2'-deoxy-2'-fluoroguanosine-3'-phosphate
  modified_base 8: mod_base = OTHER; note = 2'-O-methyluridine-3'-phosphate
  modified_base 9: mod_base = OTHER; note = 2'-deoxy-2'-fluorocytidine-3'-phosphate
  modified_base 10: mod_base = OTHER; note = 2'-deoxy-2'-fluoroadenosine-3'-phosphate
  modified_base 11: mod_base = OTHER; note = 2'-deoxy-2'-fluorouridine-3'-phosphate
  modified_base 12: mod_base = OTHER; note = 2'-O-methylcytidine-3'-phosphate
  modified_base 13: mod_base = OTHER; note = 2'-O-methyladenosine-3'-phosphate
  modified_base 14: mod_base = OTHER; note = 2'-O-methyladenosine-3'-phosphate
  modified_base 15: mod_base = OTHER; note = 2'-O-methylguanosine-3'-phosphate
  modified_base 16: mod_base = OTHER; note = 2'-O-methylguanosine-3'-phosphate
  modified_base 17: mod_base = OTHER; note = 2'-O-methyluridine-3'-phosphate
  modified_base 18: mod_base = OTHER; note = 2'-O-methyladenosine-3'-phosphate
  modified_base 19: mod_base = OTHER; note = 2'-O-methyladenosine-3'-phosphate
  modified_base 20: mod_base = OTHER; note = 2'-O-methylcytidine-3'-phosphate
  modified_base 21: mod_base = OTHER; note = 2'-O-methyladenosine-3'-phosphate ((2S,4R)-1-[29-[[2-(acetylamino)-2-deoxy-beta-D-galactopyra nosyl]oxy]-14,14-bis[[3-[[3-[[5-[[2-(acetylamino)-2-deoxy-b eta-D-galactopyranosyl]oxy]-1-oxopentyl]amino]propyl]amino] -3-oxopropoxy]methyl]-1,12,19,25-tetraoxo-16-oxa-13,20,24-t riazanonacos-1-yl]-4-hydroxy-2-pyrrolidinyl)methyl ester
aaagctgtcatcaaggtaaca

SEQ ID NO: 739 - RNA, 21 nt, synthetic construct
  source 1..21: mol_type = other RNA
  modified_base 1: mod_base = OTHER; note = 2'-O-methyladenosine-3'-phosphorothioate
  modified_base 2: mod_base = OTHER; note = 2'-O-methyladenosine-3'-phosphorothioate
  modified_base 3: mod_base = OTHER; note = 2'-O-methylguanosine-3'-phosphate
  modified_base 4: mod_base = OTHER; note = 2'-O-methylcytidine-3'-phosphate
  modified_base 5: mod_base = OTHER; note = 2'-O-methyluridine-3'-phosphate
  modified_base 6: mod_base = OTHER; note = 2'-O-methylguanosine-3'-phosphate
  modified_base 7: mod_base = OTHER; note = 2'-deoxy-2'-fluorouridine-3'-phosphate
  modified_base 8: mod_base = OTHER; note = 2'-O-methylcytidine-3'-phosphate
  modified_base 9: mod_base = OTHER; note = 2'-deoxy-2'-fluoroadenosine-3'-phosphate
  modified_base 10: mod_base = OTHER; note = 2'-deoxy-2'-fluorouridine-3'-phosphate
  modified_base 11: mod_base = OTHER; note = 2'-deoxy-2'-fluorocytidine-3'-phosphate
  modified_base 12: mod_base = OTHER; note = 2'-O-methyladenosine-3'-phosphate
  modified_base 13: mod_base = OTHER; note = 2'-O-methyladenosine-3'-phosphate
  modified_base 14: mod_base = OTHER; note = 2'-O-methylguanosine-3'-phosphate
  modified_base 15: mod_base = OTHER; note = 2'-O-methylguanosine-3'-phosphate
  modified_base 16: mod_base = OTHER; note = 2'-O-methyluridine-3'-phosphate
  modified_base 17: mod_base = OTHER; note = 2'-O-methyladenosine-3'-phosphate
  modified_base 18: mod_base = OTHER; note = 2'-O-methyladenosine-3'-phosphate
  modified_base 19: mod_base = OTHER; note = 2'-O-methylcytidine-3'-phosphate
  modified_base 20: mod_base = OTHER; note = 2'-O-methylcytidine-3'-phosphate
  modified_base 21: mod_base = OTHER; note = 2'-O-methyladenosine-3'-phosphate ((2S,4R)-1-[29-[[2-(acetylamino)-2-deoxy-beta-D-galactopyra nosyl]oxy]-14,14-bis[[3-[[3-[[5-[[2-(acetylamino)-2-deoxy-b eta-D-galactopyranosyl]oxy]-1-oxopentyl]amino]propyl]amino] -3-oxopropoxy]methyl]-1,12,19,25-tetraoxo-16-oxa-13,20,24-t riazanonacos-1-yl]-4-hydroxy-2-pyrrolidinyl)methyl ester
aagctgtcatcaaggtaacca

SEQ ID NO: 740 - RNA, 21 nt, synthetic construct
  source 1..21: mol_type = other RNA
  modified_base 1: mod_base = OTHER; note = 2'-O-methyluridine-3'-phosphorothioate
  modified_base 2: mod_base = OTHER; note = 2'-O-methyluridine-3'-phosphorothioate
  modified_base 3: mod_base = OTHER; note = 2'-O-methylcytidine-3'-phosphate
  modified_base 4: mod_base = OTHER; note = 2'-O-methyladenosine-3'-phosphate
  modified_base 5: mod_base = OTHER; note = 2'-O-methyladenosine-3'-phosphate
  modified_base 6: mod_base = OTHER; note = 2'-O-methylguanosine-3'-phosphate
  modified_base 7: mod_base = OTHER; note = 2'-deoxy-2'-fluorouridine-3'-phosphate
  modified_base 8: mod_base = OTHER; note = 2'-O-methylguanosine-3'-phosphate
  modified_base 9: mod_base = OTHER; note = 2'-deoxy-2'-fluorouridine-3'-phosphate
  modified_base 10: mod_base = OTHER; note = 2'-deoxy-2'-fluorocytidine-3'-phosphate
  modified_base 11: mod_base = OTHER; note = 2'-deoxy-2'-fluorocytidine-3'-phosphate
  modified_base 12: mod_base = OTHER; note = 2'-O-methyluridine-3'-phosphate
  modified_base 13: mod_base = OTHER; note = 2'-O-methylguanosine-3'-phosphate
  modified_base 14: mod_base = OTHER; note = 2'-O-methyladenosine-3'-phosphate
  modified_base 15: mod_base = OTHER; note = 2'-O-methylguanosine-3'-phosphate
  modified_base 16: mod_base = OTHER; note = 2'-O-methyluridine-3'-phosphate
  modified_base 17: mod_base = OTHER; note = 2'-O-methylguanosine-3'-phosphate
  modified_base 18: mod_base = OTHER; note = 2'-O-methylcytidine-3'-phosphate
  modified_base 19: mod_base = OTHER; note = 2'-O-methyladenosine-3'-phosphate
  modified_base 20: mod_base = OTHER; note = 2'-O-methylcytidine-3'-phosphate
  modified_base 21: mod_base = OTHER; note = 2'-O-methyladenosine-3'-phosphate ((2S,4R)-1-[29-[[2-(acetylamino)-2-deoxy-beta-D-galactopyra nosyl]oxy]-14,14-bis[[3-[[3-[[5-[[2-(acetylamino)-2-deoxy-b eta-D-galactopyranosyl]oxy]-1-oxopentyl]amino]propyl]amino] -3-oxopropoxy]methyl]-1,12,19,25-tetraoxo-16-oxa-13,20,24-t riazanonacos-1-yl]-4-hydroxy-2-pyrrolidinyl)methyl ester
ttcaagtgtcctgagtgcaca

SEQ ID NO: 741 - RNA, 21 nt, synthetic construct
  source 1..21: mol_type = other RNA
  modified_base 1: mod_base = OTHER; note = 2'-O-methylcytidine-3'-phosphorothioate
  modified_base 2: mod_base = OTHER; note = 2'-O-methyluridine-3'-phosphorothioate
  modified_base 3: mod_base = OTHER; note = 2'-O-methyladenosine-3'-phosphate
  modified_base 4: mod_base = OTHER; note = 2'-O-methylguanosine-3'-phosphate
  modified_base 5: mod_base = OTHER; note = 2'-O-methyladenosine-3'-phosphate
  modified_base 6: mod_base = OTHER; note = 2'-O-methylcytidine-3'-phosphate
  modified_base 7: mod_base = OTHER; note = 2'-deoxy-2'-fluorocytidine-3'-phosphate
  modified_base 8: mod_base = OTHER; note = 2'-O-methyladenosine-3'-phosphate
  modified_base 9: mod_base = OTHER; note = 2'-deoxy-2'-fluoroguanosine-3'-phosphate
  modified_base 10: mod_base = OTHER; note = 2'-deoxy-2'-fluoroadenosine-3'-phosphate
  modified_base 11: mod_base = OTHER; note = 2'-deoxy-2'-fluorocytidine-3'-phosphate
  modified_base 12: mod_base = OTHER; note = 2'-O-methyluridine-3'-phosphate
  modified_base 13: mod_base = OTHER; note = 2'-O-methylcytidine-3'-phosphate
  modified_base 14: mod_base = OTHER; note = 2'-O-methyladenosine-3'-phosphate
  modified_base 15: mod_base = OTHER; note = 2'-O-methylcytidine-3'-phosphate
  modified_base 16: mod_base = OTHER; note = 2'-O-methyladenosine-3'-phosphate
  modified_base 17: mod_base = OTHER; note = 2'-O-methyluridine-3'-phosphate
  modified_base 18: mod_base = OTHER; note = 2'-O-methylguanosine-3'-phosphate
  modified_base 19: mod_base = OTHER; note = 2'-O-methylguanosine-3'-phosphate
  modified_base 20: mod_base = OTHER; note = 2'-O-methyluridine-3'-phosphate
  modified_base 21: mod_base = OTHER; note = 2'-O-methyladenosine-3'-phosphate ((2S,4R)-1-[29-[[2-(acetylamino)-2-deoxy-beta-D-galactopyra nosyl]oxy]-14,14-bis[[3-[[3-[[5-[[2-(acetylamino)-2-deoxy-b eta-D-galactopyranosyl]oxy]-1-oxopentyl]amino]propyl]amino] -3-oxopropoxy]methyl]-1,12,19,25-tetraoxo-16-oxa-13,20,24-t riazanonacos-1-yl]-4-hydroxy-2-pyrrolidinyl)methyl ester
ctagaccagactcacatggta

SEQ ID NO: 742 - RNA, 21 nt, synthetic construct
  source 1..21: mol_type = other RNA
  modified_base 1: mod_base = OTHER; note = 2'-O-methyluridine-3'-phosphorothioate
  modified_base 2: mod_base = OTHER; note = 2'-O-methyladenosine-3'-phosphorothioate
  modified_base 3: mod_base = OTHER; note = 2'-O-methylguanosine-3'-phosphate
  modified_base 4: mod_base = OTHER; note = 2'-O-methyladenosine-3'-phosphate
  modified_base 5: mod_base = OTHER; note = 2'-O-methylcytidine-3'-phosphate
  modified_base 6: mod_base = OTHER; note = 2'-O-methylcytidine-3'-phosphate
  modified_base 7: mod_base = OTHER; note = 2'-deoxy-2'-fluoroadenosine-3'-phosphate
  modified_base 8: mod_base = OTHER; note = 2'-O-methylguanosine-3'-phosphate
  modified_base 9: mod_base = OTHER; note = 2'-deoxy-2'-fluoroadenosine-3'-phosphate
  modified_base 10: mod_base = OTHER; note = 2'-deoxy-2'-fluorocytidine-3'-phosphate
  modified_base 11: mod_base = OTHER; note = 2'-deoxy-2'-fluorouridine-3'-phosphate
  modified_base 12: mod_base = OTHER; note = 2'-O-methylcytidine-3'-phosphate
  modified_base 13: mod_base = OTHER; note = 2'-O-methyladenosine-3'-phosphate
  modified_base 14: mod_base = OTHER; note = 2'-O-methylcytidine-3'-phosphate
  modified_base 15: mod_base = OTHER; note = 2'-O-methyladenosine-3'-phosphate
  modified_base 16: mod_base = OTHER; note = 2'-O-methyluridine-3'-phosphate
  modified_base 17: mod_base = OTHER; note = 2'-O-methylguanosine-3'-phosphate
  modified_base 18: mod_base = OTHER; note = 2'-O-methylguanosine-3'-phosphate
  modified_base 19: mod_base = OTHER; note = 2'-O-methyluridine-3'-phosphate
  modified_base 20: mod_base = OTHER; note = 2'-O-methyladenosine-3'-phosphate
  modified_base 21: mod_base = OTHER; note = 2'-O-methyladenosine-3'-phosphate ((2S,4R)-1-[29-[[2-(acetylamino)-2-deoxy-beta-D-galactopyra nosyl]oxy]-14,14-bis[[3-[[3-[[5-[[2-(acetylamino)-2-deoxy-b eta-D-galactopyranosyl]oxy]-1-oxopentyl]amino]propyl]amino] -3-oxopropoxy]methyl]-1,12,19,25-tetraoxo-16-oxa-13,20,24-t riazanonacos-1-yl]-4-hydroxy-2-pyrrolidinyl)methyl ester
tagaccagactcacatggtaa

SEQ ID NO: 743 - RNA, 21 nt, synthetic construct
  source 1..21: mol_type = other RNA
  modified_base 1: mod_base = OTHER; note = 2'-O-methyladenosine-3'-phosphorothioate
  modified_base 2: mod_base = OTHER; note = 2'-O-methyladenosine-3'-phosphorothioate
  modified_base 3: mod_base = OTHER; note = 2'-O-methylcytidine-3'-phosphate
  modified_base 4: mod_base = OTHER; note = 2'-O-methyladenosine-3'-phosphate
  modified_base 5: mod_base = OTHER; note = 2'-O-methyladenosine-3'-phosphate
  modified_base 6: mod_base = OTHER; note = 2'-O-methylguanosine-3'-phosphate
  modified_base 7: mod_base = OTHER; note = 2'-deoxy-2'-fluorouridine-3'-phosphate
  modified_base 8: mod_base = OTHER; note = 2'-O-methyluridine-3'-phosphate
  modified_base 9: mod_base = OTHER; note = 2'-deoxy-2'-fluorouridine-3'-phosphate
  modified_base 10: mod_base = OTHER; note = 2'-deoxy-2'-fluoroguanosine-3'-phosphate
  modified_base 11: mod_base = OTHER; note = 2'-deoxy-2'-fluorocytidine-3'-phosphate
  modified_base 12: mod_base = OTHER; note = 2'-O-methyluridine-3'-phosphate
  modified_base 13: mod_base = OTHER; note = 2'-O-methyluridine-3'-phosphate
  modified_base 14: mod_base = OTHER; note = 2'-O-methylcytidine-3'-phosphate
  modified_base 15: mod_base = OTHER; note = 2'-O-methylcytidine-3'-phosphate
  modified_base 16: mod_base = OTHER; note = 2'-O-methylguanosine-3'-phosphate
  modified_base 17: mod_base = OTHER; note = 2'-O-methyluridine-3'-phosphate
  modified_base 18: mod_base = OTHER; note = 2'-O-methylcytidine-3'-phosphate
  modified_base 19: mod_base = OTHER; note = 2'-O-methyluridine-3'-phosphate
  modified_base 20: mod_base = OTHER; note = 2'-O-methyluridine-3'-phosphate
  modified_base 21: mod_base = OTHER; note = 2'-O-methyladenosine-3'-phosphate ((2S,4R)-1-[29-[[2-(acetylamino)-2-deoxy-beta-D-galactopyra nosyl]oxy]-14,14-bis[[3-[[3-[[5-[[2-(acetylamino)-2-deoxy-b eta-D-galactopyranosyl]oxy]-1-oxopentyl]amino]propyl]amino] -3-oxopropoxy]methyl]-1,12,19,25-tetraoxo-16-oxa-13,20,24-t riazanonacos-1-yl]-4-hydroxy-2-pyrrolidinyl)methyl ester
aacaagtttgcttccgtctta

SEQ ID NO: 744 - RNA, 21 nt, synthetic construct
  source 1..21: mol_type = other RNA
  modified_base 1: mod_base = OTHER; note = 2'-O-methyladenosine-3'-phosphorothioate
  modified_base 2: mod_base = OTHER; note = 2'-O-methyladenosine-3'-phosphorothioate
  modified_base 3: mod_base = OTHER; note = 2'-O-methylguanosine-3'-phosphate
  modified_base 4: mod_base = OTHER; note = 2'-O-methyluridine-3'-phosphate
  modified_base 5: mod_base = OTHER; note = 2'-O-methyluridine-3'-phosphate
  modified_base 6: mod_base = OTHER; note = 2'-O-methyluridine-3'-phosphate
  modified_base 7: mod_base = OTHER; note = 2'-deoxy-2'-fluoroguanosine-3'-phosphate
  modified_base 8: mod_base = OTHER; note = 2'-O-methylcytidine-3'-phosphate
  modified_base 9: mod_base = OTHER; note = 2'-deoxy-2'-fluorouridine-3'-phosphate
  modified_base 10: mod_base = OTHER; note = 2'-deoxy-2'-fluorouridine-3'-phosphate
  modified_base 11: mod_base = OTHER; note = 2'-deoxy-2'-fluorocytidine-3'-phosphate
  modified_base 12: mod_base = OTHER; note = 2'-O-methylcytidine-3'-phosphate
  modified_base 13: mod_base = OTHER; note = 2'-O-methylguanosine-3'-phosphate
  modified_base 14: mod_base = OTHER; note = 2'-O-methyluridine-3'-phosphate
  modified_base 15: mod_base = OTHER; note = 2'-O-methylcytidine-3'-phosphate
  modified_base 16: mod_base = OTHER; note = 2'-O-methyluridine-3'-phosphate
  modified_base 17: mod_base = OTHER; note = 2'-O-methyluridine-3'-phosphate
  modified_base 18: mod_base = OTHER; note = 2'-O-methylcytidine-3'-phosphate
  modified_base 19: mod_base = OTHER; note = 2'-O-methylguanosine-3'-phosphate
  modified_base 20: mod_base = OTHER; note = 2'-O-methylguanosine-3'-phosphate
  modified_base 21: mod_base = OTHER; note = 2'-O-methyladenosine-3'-phosphate ((2S,4R)-1-[29-[[2-(acetylamino)-2-deoxy-beta-D-galactopyra nosyl]oxy]-14,14-bis[[3-[[3-[[5-[[2-(acetylamino)-2-deoxy-b eta-D-galactopyranosyl]oxy]-1-oxopentyl]amino]propyl]amino] -3-oxopropoxy]methyl]-1,12,19,25-tetraoxo-16-oxa-13,20,24-t riazanonacos-1-yl]-4-hydroxy-2-pyrrolidinyl)methyl ester
aagtttgcttccgtcttcgga

SEQ ID NO: 745 - RNA, 21 nt, synthetic construct
  source 1..21: mol_type = other RNA
  modified_base 1: mod_base = OTHER; note = 2'-O-methyladenosine-3'-phosphorothioate
  modified_base 2: mod_base = OTHER; note = 2'-O-methylguanosine-3'-phosphorothioate
  modified_base 3: mod_base = OTHER; note = 2'-O-methyluridine-3'-phosphate
  modified_base 4: mod_base = OTHER; note = 2'-O-methyluridine-3'-phosphate
  modified_base 5: mod_base = OTHER; note = 2'-O-methyluridine-3'-phosphate
  modified_base 6: mod_base = OTHER; note = 2'-O-methylguanosine-3'-phosphate
  modified_base 7: mod_base = OTHER; note = 2'-deoxy-2'-fluorocytidine-3'-phosphate
  modified_base 8: mod_base = OTHER; note = 2'-O-methyluridine-3'-phosphate
  modified_base 9: mod_base = OTHER; note = 2'-deoxy-2'-fluorouridine-3'-phosphate
  modified_base 10: mod_base = OTHER; note = 2'-deoxy-2'-fluorocytidine-3'-phosphate
  modified_base 11: mod_base = OTHER; note = 2'-deoxy-2'-fluorocytidine-3'-phosphate
  modified_base 12: mod_base = OTHER; note = 2'-O-methylguanosine-3'-phosphate
  modified_base 13: mod_base = OTHER; note = 2'-O-methyluridine-3'-phosphate
  modified_base 14: mod_base = OTHER; note = 2'-O-methylcytidine-3'-phosphate
  modified_base 15: mod_base = OTHER; note = 2'-O-methyluridine-3'-phosphate
  modified_base 16: mod_base = OTHER; note = 2'-O-methyluridine-3'-phosphate
  modified_base 17: mod_base = OTHER; note = 2'-O-methylcytidine-3'-phosphate
  modified_base 18: mod_base = OTHER; note = 2'-O-methylguanosine-3'-phosphate
  modified_base 19: mod_base = OTHER; note = 2'-O-methylguanosine-3'-phosphate
  modified_base 20: mod_base = OTHER; note = 2'-O-methyladenosine-3'-phosphate
  modified_base 21: mod_base = OTHER; note = 2'-O-methyladenosine-3'-phosphate ((2S,4R)-1-[29-[[2-(acetylamino)-2-deoxy-beta-D-galactopyra nosyl]oxy]-14,14-bis[[3-[[3-[[5-[[2-(acetylamino)-2-deoxy-b eta-D-galactopyranosyl]oxy]-1-oxopentyl]amino]propyl]amino] -3-oxopropoxy]methyl]-1,12,19,25-tetraoxo-16-oxa-13,20,24-t riazanonacos-1-yl]-4-hydroxy-2-pyrrolidinyl)methyl ester
agtttgcttccgtcttcggaa

SEQ ID NO: 746 - RNA, 21 nt, synthetic construct
  source 1..21: mol_type = other RNA
  modified_base 1: mod_base = OTHER; note = 2'-O-methylguanosine-3'-phosphorothioate
  modified_base 2: mod_base = OTHER; note = 2'-O-methyluridine-3'-phosphorothioate
  modified_base 3: mod_base = OTHER; note = 2'-O-methyluridine-3'-phosphate
  modified_base 4: mod_base = OTHER; note = 2'-O-methyluridine-3'-phosphate
  modified_base 5: mod_base = OTHER; note = 2'-O-methylguanosine-3'-phosphate
  modified_base 6: mod_base = OTHER; note = 2'-O-methylcytidine-3'-phosphate
  modified_base 7: mod_base = OTHER; note = 2'-deoxy-2'-fluorouridine-3'-phosphate
  modified_base 8: mod_base = OTHER; note = 2'-O-methyluridine-3'-phosphate
  modified_base 9: mod_base = OTHER; note = 2'-deoxy-2'-fluorocytidine-3'-phosphate
  modified_base 10: mod_base = OTHER; note = 2'-deoxy-2'-fluorocytidine-3'-phosphate
  modified_base 11: mod_base = OTHER; note = 2'-deoxy-2'-fluoroguanosine-3'-phosphate
  modified_base 12: mod_base = OTHER; note = 2'-O-methyluridine-3'-phosphate
  modified_base 13: mod_base = OTHER; note = 2'-O-methylcytidine-3'-phosphate
  modified_base 14: mod_base = OTHER; note = 2'-O-methyluridine-3'-phosphate
  modified_base 15: mod_base = OTHER; note = 2'-O-methyluridine-3'-phosphate
  modified_base 16: mod_base = OTHER; note = 2'-O-methylcytidine-3'-phosphate
  modified_base 17: mod_base = OTHER; note = 2'-O-methylguanosine-3'-phosphate
  modified_base 18: mod_base = OTHER; note = 2'-O-methylguanosine-3'-phosphate
  modified_base 19: mod_base = OTHER; note = 2'-O-methyladenosine-3'-phosphate
  modified_base 20: mod_base = OTHER; note = 2'-O-methyladenosine-3'-phosphate
  modified_base 21: mod_base = OTHER; note = 2'-O-methyladenosine-3'-phosphate ((2S,4R)-1-[29-[[2-(acetylamino)-2-deoxy-beta-D-galactopyra nosyl]oxy]-14,14-bis[[3-[[3-[[5-[[2-(acetylamino)-2-deoxy-b eta-D-galactopyranosyl]oxy]-1-oxopentyl]amino]propyl]amino] -3-oxopropoxy]methyl]-1,12,19,25-tetraoxo-16-oxa-13,20,24-t riazanonacos-1-yl]-4-hydroxy-2-pyrrolidinyl)methyl ester
gtttgcttccgtcttcggaaa

SEQ ID NO: 747 - RNA, 21 nt, synthetic construct
  source 1..21: mol_type = other RNA
  modified_base 1: mod_base = OTHER; note = 2'-O-methyluridine-3'-phosphorothioate
  modified_base 2: mod_base = OTHER; note = 2'-O-methyluridine-3'-phosphorothioate
  modified_base 3: mod_base = OTHER; note = 2'-O-methyluridine-3'-phosphate
  modified_base 4: mod_base = OTHER; note = 2'-O-methylguanosine-3'-phosphate
  modified_base 5: mod_base = OTHER; note = 2'-O-methylcytidine-3'-phosphate
  modified_base 6: mod_base = OTHER; note = 2'-O-methyluridine-3'-phosphate
  modified_base 7: mod_base = OTHER; note = 2'-deoxy-2'-fluorouridine-3'-phosphate
  modified_base 8: mod_base = OTHER; note = 2'-O-methylcytidine-3'-phosphate
  modified_base 9: mod_base = OTHER; note = 2'-deoxy-2'-fluorocytidine-3'-phosphate
  modified_base 10: mod_base = OTHER; note = 2'-deoxy-2'-fluoroguanosine-3'-phosphate
  modified_base 11: mod_base = OTHER; note = 2'-deoxy-2'-fluorouridine-3'-phosphate
  modified_base 12: mod_base = OTHER; note = 2'-O-methylcytidine-3'-phosphate
  modified_base 13: mod_base = OTHER; note = 2'-O-methyluridine-3'-phosphate
  modified_base 14: mod_base = OTHER; note = 2'-O-methyluridine-3'-phosphate
  modified_base 15: mod_base = OTHER; note = 2'-O-methylcytidine-3'-phosphate
  modified_base 16: mod_base = OTHER; note = 2'-O-methylguanosine-3'-phosphate
  modified_base 17: mod_base = OTHER; note = 2'-O-methylguanosine-3'-phosphate
  modified_base 18: mod_base = OTHER; note = 2'-O-methyladenosine-3'-phosphate
  modified_base 19: mod_base = OTHER; note = 2'-O-methyladenosine-3'-phosphate
  modified_base 20: mod_base = OTHER; note = 2'-O-methylcytidine-3'-phosphate
  modified_base 21: mod_base = OTHER; note = 2'-O-methyladenosine-3'-phosphate ((2S,4R)-1-[29-[[2-(acetylamino)-2-deoxy-beta-D-galactopyra nosyl]oxy]-14,14-bis[[3-[[3-[[5-[[2-(acetylamino)-2-deoxy-b eta-D-galactopyranosyl]oxy]-1-oxopentyl]amino]propyl]amino] -3-oxopropoxy]methyl]-1,12,19,25-tetraoxo-16-oxa-13,20,24-t riazanonacos-1-yl]-4-hydroxy-2-pyrrolidinyl)methyl ester
tttgcttccgtcttcggaaca

SEQ ID NO: 748 - RNA, 21 nt, synthetic construct
  source 1..21: mol_type = other RNA
  modified_base 1: mod_base = OTHER; note = 2'-O-methyluridine-3'-phosphorothioate
  modified_base 2: mod_base = OTHER; note = 2'-O-methyluridine-3'-phosphorothioate
  modified_base 3: mod_base = OTHER; note = 2'-O-methylguanosine-3'-phosphate
  modified_base 4: mod_base = OTHER; note = 2'-O-methylcytidine-3'-phosphate
  modified_base 5: mod_base = OTHER; note = 2'-O-methyluridine-3'-phosphate
  modified_base 6: mod_base = OTHER; note = 2'-O-methyluridine-3'-phosphate
  modified_base 7: mod_base = OTHER; note = 2'-deoxy-2'-fluorocytidine-3'-phosphate
  modified_base 8: mod_base = OTHER; note = 2'-O-methylcytidine-3'-phosphate
  modified_base 9: mod_base = OTHER; note = 2'-deoxy-2'-fluoroguanosine-3'-phosphate
  modified_base 10: mod_base = OTHER; note = 2'-deoxy-2'-fluorouridine-3'-phosphate
  modified_base 11: mod_base = OTHER; note = 2'-deoxy-2'-fluorocytidine-3'-phosphate
  modified_base 12: mod_base = OTHER; note = 2'-O-methyluridine-3'-phosphate
  modified_base 13: mod_base = OTHER; note = 2'-O-methyluridine-3'-phosphate
  modified_base 14: mod_base = OTHER; note = 2'-O-methylcytidine-3'-phosphate
  modified_base 15: mod_base = OTHER; note = 2'-O-methylguanosine-3'-phosphate
  modified_base 16: mod_base = OTHER; note = 2'-O-methylguanosine-3'-phosphate
  modified_base 17: mod_base = OTHER; note = 2'-O-methyladenosine-3'-phosphate
  modified_base 18: mod_base = OTHER; note = 2'-O-methyladenosine-3'-phosphate
  modified_base 19: mod_base = OTHER; note = 2'-O-methylcytidine-3'-phosphate
  modified_base 20: mod_base = OTHER; note = 2'-O-methylguanosine-3'-phosphate
  modified_base 21: mod_base = OTHER; note = 2'-O-methyladenosine-3'-phosphate ((2S,4R)-1-[29-[[2-(acetylamino)-2-deoxy-beta-D-galactopyra nosyl]oxy]-14,14-bis[[3-[[3-[[5-[[2-(acetylamino)-2-deoxy-b eta-D-galactopyranosyl]oxy]-1-oxopentyl]amino]propyl]amino] -3-oxopropoxy]methyl]-1,12,19,25-tetraoxo-16-oxa-13,20,24-t riazanonacos-1-yl]-4-hydroxy-2-pyrrolidinyl)methyl ester
ttgcttccgtcttcggaacga

SEQ ID NO: 749 - RNA, 21 nt, synthetic construct
  source 1..21: mol_type = other RNA
  modified_base 1: mod_base = OTHER; note = 2'-O-methyluridine-3'-phosphorothioate
  modified_base 2: mod_base = OTHER; note = 2'-O-methylguanosine-3'-phosphorothioate
  modified_base 3: mod_base = OTHER; note = 2'-O-methylcytidine-3'-phosphate
  modified_base 4: mod_base = OTHER; note = 2'-O-methyluridine-3'-phosphate
  modified_base 5: mod_base = OTHER; note = 2'-O-methyluridine-3'-phosphate
  modified_base 6: mod_base = OTHER; note = 2'-O-methylcytidine-3'-phosphate
  modified_base 7: mod_base = OTHER; note = 2'-deoxy-2'-fluorocytidine-3'-phosphate
  modified_base 8: mod_base = OTHER; note = 2'-O-methylguanosine-3'-phosphate
  modified_base 9: mod_base = OTHER; note = 2'-deoxy-2'-fluorouridine-3'-phosphate
  modified_base 10: mod_base = OTHER; note = 2'-deoxy-2'-fluorocytidine-3'-phosphate
  modified_base 11: mod_base = OTHER; note = 2'-deoxy-2'-fluorouridine-3'-phosphate
  modified_base 12: mod_base = OTHER; note = 2'-O-methyluridine-3'-phosphate
  modified_base 13: mod_base = OTHER; note = 2'-O-methylcytidine-3'-phosphate
  modified_base 14: mod_base = OTHER; note = 2'-O-methylguanosine-3'-phosphate
  modified_base 15: mod_base = OTHER; note = 2'-O-methylguanosine-3'-phosphate
  modified_base 16: mod_base = OTHER; note = 2'-O-methyladenosine-3'-phosphate
  modified_base 17: mod_base = OTHER; note = 2'-O-methyladenosine-3'-phosphate
  modified_base 18: mod_base = OTHER; note = 2'-O-methylcytidine-3'-phosphate
  modified_base 19: mod_base = OTHER; note = 2'-O-methylguanosine-3'-phosphate
  modified_base 20: mod_base = OTHER; note = 2'-O-methyladenosine-3'-phosphate
  modified_base 21: mod_base = OTHER; note = 2'-O-methyladenosine-3'-phosphate ((2S,4R)-1-[29-[[2-(acetylamino)-2-deoxy-beta-D-galactopyra nosyl]oxy]-14,14-bis[[3-[[3-[[5-[[2-(acetylamino)-2-deoxy-b eta-D-galactopyranosyl]oxy]-1-oxopentyl]amino]propyl]amino] -3-oxopropoxy]methyl]-1,12,19,25-tetraoxo-16-oxa-13,20,24-t riazanonacos-1-yl]-4-hydroxy-2-pyrrolidinyl)methyl ester
tgcttccgtcttcggaacgaa

SEQ ID NO: 750 - RNA, 21 nt, synthetic construct
  source 1..21: mol_type = other RNA
  modified_base 1: mod_base = OTHER; note = 2'-O-methylguanosine-3'-phosphorothioate
  modified_base 2: mod_base = OTHER; note = 2'-O-methylcytidine-3'-phosphorothioate
  modified_base 3: mod_base = OTHER; note = 2'-O-methyluridine-3'-phosphate
  modified_base 4: mod_base = OTHER; note = 2'-O-methyluridine-3'-phosphate
  modified_base 5: mod_base = OTHER; note = 2'-O-methylcytidine-3'-phosphate
  modified_base 6: mod_base = OTHER; note = 2'-O-methylcytidine-3'-phosphate
  modified_base 7: mod_base = OTHER; note = 2'-deoxy-2'-fluoroguanosine-3'-phosphate
  modified_base 8: mod_base = OTHER; note = 2'-O-methyluridine-3'-phosphate
  modified_base 9: mod_base = OTHER; note = 2'-deoxy-2'-fluorocytidine-3'-phosphate
  modified_base 10: mod_base = OTHER; note = 2'-deoxy-2'-fluorouridine-3'-phosphate
  modified_base 11: mod_base = OTHER; note = 2'-deoxy-2'-fluorouridine-3'-phosphate
  modified_base 12: mod_base = OTHER; note = 2'-O-methylcytidine-3'-phosphate
  modified_base 13: mod_base = OTHER; note = 2'-O-methylguanosine-3'-phosphate
  modified_base 14: mod_base = OTHER; note = 2'-O-methylguanosine-3'-phosphate
  modified_base 15: mod_base = OTHER; note = 2'-O-methyladenosine-3'-phosphate
  modified_base 16: mod_base = OTHER; note = 2'-O-methyladenosine-3'-phosphate
  modified_base 17: mod_base = OTHER; note = 2'-O-methylcytidine-3'-phosphate
  modified_base 18: mod_base = OTHER; note = 2'-O-methylguanosine-3'-phosphate
  modified_base 19: mod_base = OTHER; note = 2'-O-methyladenosine-3'-phosphate
  modified_base 20: mod_base = OTHER; note = 2'-O-methyluridine-3'-phosphate
  modified_base 21: mod_base = OTHER; note = 2'-O-methyladenosine-3'-phosphate ((2S,4R)-1-[29-[[2-(acetylamino)-2-deoxy-beta-D-galactopyra nosyl]oxy]-14,14-bis[[3-[[3-[[5-[[2-(acetylamino)-2-deoxy-b eta-D-galactopyranosyl]oxy]-1-oxopentyl]amino]propyl]amino] -3-oxopropoxy]methyl]-1,12,19,25-tetraoxo-16-oxa-13,20,24-t riazanonacos-1-yl]-4-hydroxy-2-pyrrolidinyl)methyl ester
gcttccgtcttcggaacgata

SEQ ID NO: 751 - RNA, 21 nt, synthetic construct
  source 1..21: mol_type = other RNA
  modified_base 1: mod_base = OTHER; note = 2'-O-methylcytidine-3'-phosphorothioate
  modified_base 2: mod_base = OTHER; note = 2'-O-methyluridine-3'-phosphorothioate
  modified_base 3: mod_base = OTHER; note = 2'-O-methyluridine-3'-phosphate
  modified_base 4: mod_base = OTHER; note = 2'-O-methylcytidine-3'-phosphate
  modified_base 5: mod_base = OTHER; note = 2'-O-methylcytidine-3'-phosphate
  modified_base 6: mod_base = OTHER; note = 2'-O-methylguanosine-3'-phosphate
  modified_base 7: mod_base = OTHER; note = 2'-deoxy-2'-fluorouridine-3'-phosphate
  modified_base 8: mod_base = OTHER; note = 2'-O-methylcytidine-3'-phosphate
  modified_base 9: mod_base = OTHER; note = 2'-deoxy-2'-fluorouridine-3'-phosphate
  modified_base 10: mod_base = OTHER; note = 2'-deoxy-2'-fluorouridine-3'-phosphate
  modified_base 11: mod_base = OTHER; note = 2'-deoxy-2'-fluorocytidine-3'-phosphate
  modified_base 12: mod_base = OTHER; note = 2'-O-methylguanosine-3'-phosphate
  modified_base 13: mod_base = OTHER; note = 2'-O-methylguanosine-3'-phosphate
  modified_base 14: mod_base = OTHER; note = 2'-O-methyladenosine-3'-phosphate
  modified_base 15: mod_base = OTHER; note = 2'-O-methyladenosine-3'-phosphate
  modified_base 16: mod_base = OTHER; note = 2'-O-methylcytidine-3'-phosphate
  modified_base 17: mod_base = OTHER; note = 2'-O-methylguanosine-3'-phosphate
  modified_base 18: mod_base = OTHER; note = 2'-O-methyladenosine-3'-phosphate
  modified_base 19: mod_base = OTHER; note = 2'-O-methyluridine-3'-phosphate
  modified_base 20: mod_base = OTHER; note = 2'-O-methylguanosine-3'-phosphate
  modified_base 21: mod_base = OTHER; note = 2'-O-methyladenosine-3'-phosphate ((2S,4R)-1-[29-[[2-(acetylamino)-2-deoxy-beta-D-galactopyra nosyl]oxy]-14,14-bis[[3-[[3-[[5-[[2-(acetylamino)-2-deoxy-b eta-D-galactopyranosyl]oxy]-1-oxopentyl]amino]propyl]amino] -3-oxopropoxy]methyl]-1,12,19,25-tetraoxo-16-oxa-13,20,24-t riazanonacos-1-yl]-4-hydroxy-2-pyrrolidinyl)methyl ester
cttccgtcttcggaacgatga

SEQ ID NO: 752 - RNA, 21 nt, synthetic construct
  source 1..21: mol_type = other RNA
  modified_base 1: mod_base = OTHER; note = 2'-O-methyluridine-3'-phosphorothioate
  modified_base 2: mod_base = OTHER; note = 2'-O-methyluridine-3'-phosphorothioate
  modified_base 3: mod_base = OTHER; note = 2'-O-methylguanosine-3'-phosphate
  modified_base 4: mod_base = OTHER; note = 2'-O-methyluridine-3'-phosphate
  modified_base 5: mod_base = OTHER; note = 2'-O-methyluridine-3'-phosphate
  modified_base 6: mod_base = OTHER; note = 2'-O-methyluridine-3'-phosphate
  modified_base 7: mod_base = OTHER; note = 2'-deoxy-2'-fluorouridine-3'-phosphate
  modified_base 8: mod_base = OTHER; note = 2'-O-methylguanosine-3'-phosphate
  modified_base 9: mod_base = OTHER; note = 2'-deoxy-2'-fluoroguanosine-3'-phosphate
  modified_base 10: mod_base = OTHER; note = 2'-deoxy-2'-fluorocytidine-3'-phosphate
  modified_base 11: mod_base = OTHER; note = 2'-deoxy-2'-fluorouridine-3'-phosphate
  modified_base 12: mod_base = OTHER; note = 2'-O-methyluridine-3'-phosphate
  modified_base 13: mod_base = OTHER; note = 2'-O-methyluridine-3'-phosphate
  modified_base 14: mod_base = OTHER; note = 2'-O-methyluridine-3'-phosphate
  modified_base 15: mod_base = OTHER; note = 2'-O-methyluridine-3'-phosphate
  modified_base 16: mod_base = OTHER; note = 2'-O-methylguanosine-3'-phosphate
  modified_base 17: mod_base = OTHER; note = 2'-O-methyladenosine-3'-phosphate
  modified_base 18: mod_base = OTHER; note = 2'-O-methyluridine-3'-phosphate
  modified_base 19: mod_base = OTHER; note = 2'-O-methyladenosine-3'-phosphate
  modified_base 20: mod_base = OTHER; note = 2'-O-methyluridine-3'-phosphate
  modified_base 21: mod_base = OTHER; note = 2'-O-methyladenosine-3'-phosphate ((2S,4R)-1-[29-[[2-(acetylamino)-2-deoxy-beta-D-galactopyra nosyl]oxy]-14,14-bis[[3-[[3-[[5-[[2-(acetylamino)-2-deoxy-b eta-D-galactopyranosyl]oxy]-1-oxopentyl]amino]propyl]amino] -3-oxopropoxy]methyl]-1,12,19,25-tetraoxo-16-oxa-13,20,24-t riazanonacos-1-yl]-4-hydroxy-2-pyrrolidinyl)methyl ester
ttgttttggctttttgatata

SEQ ID NO: 753 - RNA, 23 nt, synthetic construct
  source 1..23: mol_type = other RNA
  modified_base 1: mod_base = OTHER; note = 2'-O-methyluridine-3'-phosphorothioate 5'-(E)-Vinylphosphonate
  modified_base 2: mod_base = OTHER; note = 2'-deoxy-2'-fluorocytidine-3'-phosphorothioate
  modified_base 3: mod_base = OTHER; note = 2'-O-methylcytidine-3'-phosphate
  modified_base 4: mod_base = OTHER; note = 2'-O-methylguanosine-3'-phosphate
  modified_base 5: mod_base = OTHER; note = 2'-O-methylguanosine-3'-phosphate
  modified_base 6: mod_base = OTHER; note = 2'-deoxy-2'-fluoroadenosine-3'-phosphate
  modified_base 7: mod_base = OTHER; note = 2'-O-methyluridine-3'-phosphate
  modified_base 8: mod_base = OTHER; note = 2'-deoxy-2'-fluoroguanosine-3'-phosphate
  modified_base 9: mod_base = OTHER; note = 2'-deoxy-2'-fluorouridine-3'-phosphate
  modified_base 10: mod_base = OTHER; note = 2'-O-methyluridine-3'-phosphate
  modified_base 11: mod_base = OTHER; note = 2'-O-methylguanosine-3'-phosphate
  modified_base 12: mod_base = OTHER; note = 2'-O-methylguanosine-3'-phosphate
  modified_base 13: mod_base = OTHER; note = 2'-O-methyladenosine-3'-phosphate
  modified_base 14: mod_base = OTHER; note = 2'-deoxy-2'-fluorocytidine-3'-phosphate
  modified_base 15: mod_base = OTHER; note = 2'-O-methyluridine-3'-phosphate
  modified_base 16: mod_base = OTHER; note = 2'-deoxy-2'-fluorouridine-3'-phosphate
  modified_base 17: mod_base = OTHER; note = 2'-O-methylguanosine-3'-phosphate
  modified_base 18: mod_base = OTHER; note = 2'-O-methyladenosine-3'-phosphate
  modified_base 19: mod_base = OTHER; note = 2'-O-methylcytidine-3'-phosphate
  modified_base 20: mod_base = OTHER; note = 2'-O-methyluridine-3'-phosphate
  modified_base 21: mod_base = OTHER; note = 2'-O-methylguanosine-3'-phosphorothioate
  modified_base 22: mod_base = OTHER; note = 2'-O-methyladenosine-3'-phosphorothioate
  modified_base 23: mod_base = OTHER; note = 2'-O-methylcytidine
tccggatgttggacttgactgac

SEQ ID NO: 754 - RNA, 23 nt, synthetic construct
  source 1..23: mol_type = other RNA
  modified_base 1: mod_base = OTHER; note = 2'-O-methyluridine-3'-phosphorothioate 5'-(E)-Vinylphosphonate
  modified_base 2: mod_base = OTHER; note = 2'-deoxy-2'-fluoroadenosine-3'-phosphorothioate
  modified_base 3: mod_base = OTHER; note = 2'-O-methylcytidine-3'-phosphate
  modified_base 4: mod_base = OTHER; note = 2'-O-methylguanosine-3'-phosphate
  modified_base 5: mod_base = OTHER; note = 2'-O-methyluridine-3'-phosphate
  modified_base 6: mod_base = OTHER; note = 2'-deoxy-2'-fluoroadenosine-3'-phosphate
  modified_base 7: mod_base = OTHER; note = 2'-O-methylguanosine-3'-phosphate
  modified_base 8: mod_base = OTHER; note = 2'-deoxy-2'-fluorouridine-3'-phosphate
  modified_base 9: mod_base = OTHER; note = 2'-deoxy-2'-fluoroadenosine-3'-phosphate
  modified_base 10: mod_base = OTHER; note = 2'-O-methylguanosine-3'-phosphate
  modified_base 11: mod_base = OTHER; note = 2'-O-methyladenosine-3'-phosphate
  modified_base 12: mod_base = OTHER; note = 2'-O-methyluridine-3'-phosphate
  modified_base 13: mod_base = OTHER; note = 2'-O-methyluridine-3'-phosphate
  modified_base 14: mod_base = OTHER; note = 2'-deoxy-2'-fluorocytidine-3'-phosphate
  modified_base 15: mod_base = OTHER; note = 2'-O-methylguanosine-3'-phosphate
  modified_base 16: mod_base = OTHER; note = 2'-deoxy-2'-fluoroguanosine-3'-phosphate
  modified_base 17: mod_base = OTHER; note = 2'-O-methyluridine-3'-phosphate
  modified_base 18: mod_base = OTHER; note = 2'-O-methylguanosine-3'-phosphate
  modified_base 19: mod_base = OTHER; note = 2'-O-methylcytidine-3'-phosphate
  modified_base 20: mod_base = OTHER; note = 2'-O-methyluridine-3'-phosphate
  modified_base 21: mod_base = OTHER; note = 2'-O-methyluridine-3'-phosphorothioate
  modified_base 22: mod_base = OTHER; note = 2'-O-methylguanosine-3'-phosphorothioate
  modified_base 23: mod_base = OTHER; note = 2'-O-methylguanosine
tacgtagtagattcggtgcttgg

SEQ ID NO: 755 - RNA, 23 nt, synthetic construct
  source 1..23: mol_type = other RNA
  modified_base 1: mod_base = OTHER; note = 2'-O-methyluridine-3'-phosphorothioate 5'-(E)-Vinylphosphonate
  modified_base 2: mod_base = OTHER; note = 2'-deoxy-2'-fluorouridine-3'-phosphorothioate
  modified_base 3: mod_base = OTHER; note = 2'-O-methyladenosine-3'-phosphate
  modified_base 4: mod_base = OTHER; note = 2'-O-methylguanosine-3'-phosphate
  modified_base 5: mod_base = OTHER; note = 2'-O-methyladenosine-3'-phosphate
  modified_base 6: mod_base = OTHER; note = 2'-deoxy-2'-fluorocytidine-3'-phosphate
  modified_base 7: mod_base = OTHER; note = 2'-O-methyladenosine-3'-phosphate
  modified_base 8: mod_base = OTHER; note = 2'-deoxy-2'-fluorouridine-3'-phosphate
  modified_base 9: mod_base = OTHER; note = 2'-deoxy-2'-fluorocytidine-3'-phosphate
  modified_base 10: mod_base = OTHER; note = 2'-O-methylguanosine-3'-phosphate
  modified_base 11: mod_base = OTHER; note = 2'-O-methyladenosine-3'-phosphate
  modified_base 12: mod_base = OTHER; note = 2'-O-methyladenosine-3'-phosphate
  modified_base 13: mod_base = OTHER; note = 2'-O-methyladenosine-3'-phosphate
  modified_base 14: mod_base = OTHER; note = 2'-deoxy-2'-fluorocytidine-3'-phosphate
  modified_base 15: mod_base = OTHER; note = 2'-O-methyladenosine-3'-phosphate
  modified_base 16: mod_base = OTHER; note = 2'-deoxy-2'-fluorocytidine-3'-phosphate
  modified_base 17: mod_base = OTHER; note = 2'-O-methylguanosine-3'-phosphate
  modified_base 18: mod_base = OTHER; note = 2'-O-methyluridine-3'-phosphate
  modified_base 19: mod_base = OTHER; note = 2'-O-methyladenosine-3'-phosphate
  modified_base 20: mod_base = OTHER; note = 2'-O-methyluridine-3'-phosphate
  modified_base 21: mod_base = OTHER; note = 2'-O-methylguanosine-3'-phosphorothioate
  modified_base 22: mod_base = OTHER; note = 2'-O-methylcytidine-3'-phosphorothioate
  modified_base 23: mod_base = OTHER; note = 2'-O-methyladenosine
ttagacatcgaaacacgtatgca

SEQ ID NO: 756 - RNA, 23 nt, synthetic construct
  source 1..23: mol_type = other RNA
  modified_base 1: mod_base = OTHER; note = 2'-O-methyluridine-3'-phosphorothioate 5'-(E)-Vinylphosphonate
  modified_base 2: mod_base = OTHER; note = 2'-deoxy-2'-fluoroguanosine-3'-phosphorothioate
  modified_base 3: mod_base = OTHER; note = 2'-O-methyluridine-3'-phosphate
  modified_base 4: mod_base = OTHER; note = 2'-O-methyladenosine-3'-phosphate
  modified_base 5: mod_base = OTHER; note = 2'-O-methylguanosine-3'-phosphate
  modified_base 6: mod_base = OTHER; note = 2'-deoxy-2'-fluoroadenosine-3'-phosphate
  modified_base 7: mod_base = OTHER; note = 2'-O-methylcytidine-3'-phosphate
  modified_base 8: mod_base = OTHER; note = 2'-deoxy-2'-fluoroadenosine-3'-phosphate
  modified_base 9: mod_base = OTHER; note = 2'-deoxy-2'-fluorouridine-3'-phosphate
  modified_base 10: mod_base = OTHER; note = 2'-O-methylcytidine-3'-phosphate
  modified_base 11: mod_base = OTHER; note = 2'-O-methylguanosine-3'-phosphate
  modified_base 12: mod_base = OTHER; note = 2'-O-methyladenosine-3'-phosphate
  modified_base 13: mod_base = OTHER; note = 2'-O-methyladenosine-3'-phosphate
  modified_base 14: mod_base = OTHER; note = 2'-deoxy-2'-fluoroadenosine-3'-phosphate
  modified_base 15: mod_base = OTHER; note = 2'-O-methylcytidine-3'-phosphate
  modified_base 16: mod_base = OTHER; note = 2'-deoxy-2'-fluoroadenosine-3'-phosphate
  modified_base 17: mod_base = OTHER; note = 2'-O-methylcytidine-3'-phosphate
  modified_base 18: mod_base = OTHER; note = 2'-O-methylguanosine-3'-phosphate
  modified_base 19: mod_base = OTHER; note = 2'-O-methyluridine-3'-phosphate
  modified_base 20: mod_base = OTHER; note = 2'-O-methyladenosine-3'-phosphate
  modified_base 21: mod_base = OTHER; note = 2'-O-methyluridine-3'-phosphorothioate
  modified_base 22: mod_base = OTHER; note = 2'-O-methylguanosine-3'-phosphorothioate
  modified_base 23: mod_base = OTHER; note = 2'-O-methylcytidine
tgtagacatcgaaacacgtatgc

SEQ ID NO: 757 - RNA, 23 nt, synthetic construct
  source 1..23: mol_type = other RNA
  modified_base 1: mod_base = OTHER; note = 2'-O-methyluridine-3'-phosphorothioate 5'-(E)-Vinylphosphonate
  modified_base 2: mod_base = OTHER; note = 2'-deoxy-2'-fluoroguanosine-3'-phosphorothioate
  modified_base 3: mod_base = OTHER; note = 2'-O-methylguanosine-3'-phosphate
  modified_base 4: mod_base = OTHER; note = 2'-O-methyluridine-3'-phosphate
  modified_base 5: mod_base = OTHER; note = 2'-O-methyladenosine-3'-phosphate
  modified_base 6: mod_base = OTHER; note = 2'-deoxy-2'-fluoroguanosine-3'-phosphate
  modified_base 7: mod_base = OTHER; note = 2'-O-methyladenosine-3'-phosphate
  modified_base 8: mod_base = OTHER; note = 2'-deoxy-2'-fluorocytidine-3'-phosphate
  modified_base 9: mod_base = OTHER; note = 2'-deoxy-2'-fluoroadenosine-3'-phosphate
  modified_base 10: mod_base = OTHER; note = 2'-O-methyluridine-3'-phosphate
  modified_base 11: mod_base = OTHER; note = 2'-O-methylcytidine-3'-phosphate
  modified_base 12: mod_base = OTHER; note = 2'-O-methylguanosine-3'-phosphate
  modified_base 13: mod_base = OTHER; note = 2'-O-methyladenosine-3'-phosphate
  modified_base 14: mod_base = OTHER; note = 2'-deoxy-2'-fluoroadenosine-3'-phosphate
  modified_base 15: mod_base = OTHER; note = 2'-O-methyladenosine-3'-phosphate
  modified_base 16: mod_base = OTHER; note = 2'-deoxy-2'-fluorocytidine-3'-phosphate
  modified_base 17: mod_base = OTHER; note = 2'-O-methyladenosine-3'-phosphate
  modified_base 18: mod_base = OTHER; note = 2'-O-methylcytidine-3'-phosphate
  modified_base 19: mod_base = OTHER; note = 2'-O-methylguanosine-3'-phosphate
  modified_base 20: mod_base = OTHER; note = 2'-O-methyluridine-3'-phosphate
  modified_base 21: mod_base = OTHER; note = 2'-O-methyladenosine-3'-phosphorothioate
  modified_base 22: mod_base = OTHER; note = 2'-O-methyluridine-3'-phosphorothioate
  modified_base 23: mod_base = OTHER; note = 2'-O-methylguanosine
tggtagacatcgaaacacgtatg

SEQ ID NO: 758 - RNA, 23 nt, synthetic construct
  source 1..23: mol_type = other RNA
  modified_base 1: mod_base = OTHER; note = 2'-O-methyluridine-3'-phosphorothioate 5'-(E)-Vinylphosphonate
  modified_base 2: mod_base = OTHER; note = 2'-deoxy-2'-fluoroadenosine-3'-phosphorothioate
  modified_base 3: mod_base = OTHER; note = 2'-O-methylguanosine-3'-phosphate
  modified_base 4: mod_base = OTHER; note = 2'-O-methylcytidine-3'-phosphate
  modified_base 5: mod_base = OTHER; note = 2'-O-methylguanosine-3'-phosphate
  modified_base 6: mod_base = OTHER; note = 2'-deoxy-2'-fluoroguanosine-3'-phosphate
  modified_base 7: mod_base = OTHER; note = 2'-O-methyluridine-3'-phosphate
  modified_base 8: mod_base = OTHER; note = 2'-deoxy-2'-fluoroadenosine-3'-phosphate
  modified_base 9: mod_base = OTHER; note = 2'-deoxy-2'-fluoroguanosine-3'-phosphate
  modified_base 10: mod_base = OTHER; note = 2'-O-methyladenosine-3'-phosphate
  modified_base 11: mod_base = OTHER; note = 2'-O-methylcytidine-3'-phosphate
  modified_base 12: mod_base = OTHER; note = 2'-O-methyladenosine-3'-phosphate
  modified_base 13: mod_base = OTHER; note = 2'-O-methyluridine-3'-phosphate
  modified_base 14: mod_base = OTHER; note = 2'-deoxy-2'-fluorocytidine-3'-phosphate
  modified_base 15: mod_base = OTHER; note = 2'-O-methylguanosine-3'-phosphate
  modified_base 16: mod_base = OTHER; note = 2'-deoxy-2'-fluoroadenosine-3'-phosphate
  modified_base 17: mod_base = OTHER; note = 2'-O-methyladenosine-3'-phosphate
  modified_base 18: mod_base = OTHER; note = 2'-O-methyladenosine-3'-phosphate
  modified_base 19: mod_base = OTHER; note = 2'-O-methylcytidine-3'-phosphate
  modified_base 20: mod_base = OTHER; note = 2'-O-methyladenosine-3'-phosphate
  modified_base 21: mod_base = OTHER; note = 2'-O-methylcytidine-3'-phosphorothioate
  modified_base 22: mod_base = OTHER; note = 2'-O-methylguanosine-3'-phosphorothioate
  modified_base 23: mod_base = OTHER; note = 2'-O-methyluridine
tagcggtagacatcgaaacacgt

SEQ ID NO: 759 - RNA, 23 nt, synthetic construct
  source 1..23: mol_type = other RNA
  modified_base 1: mod_base = OTHER; note = 2'-O-methyluridine-3'-phosphorothioate 5'-(E)-Vinylphosphonate
  modified_base 2: mod_base = OTHER; note = 2'-deoxy-2'-fluorocytidine-3'-phosphorothioate
  modified_base 3: mod_base = OTHER; note = 2'-O-methyladenosine-3'-phosphate
  modified_base 4: mod_base = OTHER; note = 2'-O-methylguanosine-3'-phosphate
  modified_base 5: mod_base = OTHER; note = 2'-O-methylcytidine-3'-phosphate
  modified_base 6: mod_base = OTHER; note = 2'-deoxy-2'-fluoroguanosine-3'-phosphate
  modified_base 7: mod_base = OTHER; note = 2'-O-methylguanosine-3'-phosphate
  modified_base 8: mod_base = OTHER; note = 2'-deoxy-2'-fluorouridine-3'-phosphate
  modified_base 9: mod_base = OTHER; note = 2'-deoxy-2'-fluoroadenosine-3'-phosphate
  modified_base 10: mod_base = OTHER; note = 2'-O-methylguanosine-3'-phosphate
  modified_base 11: mod_base = OTHER; note = 2'-O-methyladenosine-3'-phosphate
  modified_base 12: mod_base = OTHER; note = 2'-O-methylcytidine-3'-phosphate
  modified_base 13: mod_base = OTHER; note = 2'-O-methyladenosine-3'-phosphate
  modified_base 14: mod_base = OTHER; note = 2'-deoxy-2'-fluorouridine-3'-phosphate
  modified_base 15: mod_base = OTHER; note = 2'-O-methylcytidine-3'-phosphate
  modified_base 16: mod_base = OTHER; note = 2'-deoxy-2'-fluoroguanosine-3'-phosphate
  modified_base 17: mod_base = OTHER; note = 2'-O-methyladenosine-3'-phosphate
  modified_base 18: mod_base = OTHER; note = 2'-O-methyladenosine-3'-phosphate
  modified_base 19: mod_base = OTHER; note = 2'-O-methyladenosine-3'-phosphate
  modified_base 20: mod_base = OTHER; note = 2'-O-methylcytidine-3'-phosphate
  modified_base 21: mod_base = OTHER; note = 2'-O-methyladenosine-3'-phosphorothioate
  modified_base 22: mod_base = OTHER; note = 2'-O-methylcytidine-3'-phosphorothioate
  modified_base 23: mod_base = OTHER; note = 2'-O-methylguanosine
tcagcggtagacatcgaaacacg

SEQ ID NO: 760 - RNA, 23 nt, synthetic construct
  source 1..23: mol_type = other RNA
  modified_base 1: mod_base = OTHER; note = 2'-O-methyluridine-3'-phosphorothioate 5'-(E)-Vinylphosphonate
  modified_base 2: mod_base = OTHER; note = 2'-deoxy-2'-fluoroadenosine-3'-phosphorothioate
  modified_base 3: mod_base = OTHER; note = 2'-O-methylguanosine-3'-phosphate
  modified_base 4: mod_base = OTHER; note = 2'-O-methyladenosine-3'-phosphate
  modified_base 5: mod_base = OTHER; note = 2'-O-methyluridine-3'-phosphate
  modified_base 6: mod_base = OTHER; note = 2'-deoxy-2'-fluoroguanosine-3'-phosphate
  modified_base 7: mod_base = OTHER; note = 2'-O-methyluridine-3'-phosphate
  modified_base 8: mod_base = OTHER; note = 2'-deoxy-2'-fluoroadenosine-3'-phosphate
  modified_base 9: mod_base = OTHER; note = 2'-deoxy-2'-fluorocytidine-3'-phosphate
  modified_base 10: mod_base = OTHER; note = 2'-O-methyladenosine-3'-phosphate
  modified_base 11: mod_base = OTHER; note = 2'-O-methylcytidine-3'-phosphate
  modified_base 12: mod_base = OTHER; note = 2'-O-methylcytidine-3'-phosphate
  modified_base 13: mod_base = OTHER; note = 2'-O-methyluridine-3'-phosphate
  modified_base 14: mod_base = OTHER; note = 2'-deoxy-2'-fluorouridine-3'-phosphate
  modified_base 15: mod_base = OTHER; note = 2'-O-methylguanosine-3'-phosphate
  modified_base 16: mod_base = OTHER; note = 2'-deoxy-2'-fluoroadenosine-3'-phosphate
  modified_base 17: mod_base = OTHER; note = 2'-O-methyluridine-3'-phosphate
  modified_base 18: mod_base = OTHER; note = 2'-O-methyluridine-3'-phosphate
  modified_base 19: mod_base = OTHER; note = 2'-O-methyluridine-3'-phosphate
  modified_base 20: mod_base = OTHER; note = 2'-O-methyluridine-3'-phosphate
  modified_base 21: mod_base = OTHER; note = 2'-O-methylguanosine-3'-phosphorothioate
  modified_base 22: mod_base = OTHER; note = 2'-O-methyluridine-3'-phosphorothioate
  modified_base 23: mod_base = OTHER; note = 2'-O-methyluridine
tagatgtacaccttgattttgtt

SEQ ID NO: 761 - RNA, 23 nt, synthetic construct
  source 1..23: mol_type = other RNA
  modified_base 1: mod_base = OTHER; note = 2'-O-methyluridine-3'-phosphorothioate 5'-(E)-Vinylphosphonate
  modified_base 2: mod_base = OTHER; note = 2'-deoxy-2'-fluoroguanosine-3'-phosphorothioate
  modified_base 3: mod_base = OTHER; note = 2'-O-methylcytidine-3'-phosphate
  modified_base 4: mod_base = OTHER; note = 2'-O-methyladenosine-3'-phosphate
  modified_base 5: mod_base = OTHER; note = 2'-O-methylguanosine-3'-phosphate
  modified_base 6: mod_base = OTHER; note = 2'-deoxy-2'-fluorouridine-3'-phosphate
  modified_base 7: mod_base = OTHER; note = 2'-O-methyluridine-3'-phosphate
  modified_base 8: mod_base = OTHER; note = 2'-deoxy-2'-fluorocytidine-3'-phosphate
  modified_base 9: mod_base = OTHER; note = 2'-deoxy-2'-fluoroadenosine-3'-phosphate
  modified_base 10: mod_base = OTHER; note = 2'-O-methyluridine-3'-phosphate
  modified_base 11: mod_base = OTHER; note = 2'-O-methyluridine-3'-phosphate
  modified_base 12: mod_base = OTHER; note = 2'-O-methylguanosine-3'-phosphate
  modified_base 13: mod_base = OTHER; note = 2'-O-methyluridine-3'-phosphate
  modified_base 14: mod_base = OTHER; note = 2'-deoxy-2'-fluoroadenosine-3'-phosphate
  modified_base 15: mod_base = OTHER; note = 2'-O-methylcytidine-3'-phosphate
  modified_base 16: mod_base = OTHER; note = 2'-deoxy-2'-fluorouridine-3'-phosphate
  modified_base 17: mod_base = OTHER; note = 2'-O-methylcytidine-3'-phosphate
  modified_base 18: mod_base = OTHER; note = 2'-O-methylcytidine-3'-phosphate
  modified_base 19: mod_base = OTHER; note = 2'-O-methylcytidine-3'-phosphate
  modified_base 20: mod_base = OTHER; note = 2'-O-methylguanosine-3'-phosphate
  modified_base 21: mod_base = OTHER; note = 2'-O-methylguanosine-3'-phosphorothioate
  modified_base 22: mod_base = OTHER; note = 2'-O-methylguanosine-3'-phosphorothioate
  modified_base 23: mod_base = OTHER; note = 2'-O-methyladenosine
tgcagttcattgtactcccggga

SEQ ID NO: 762 - RNA, 23 nt, synthetic construct
  source 1..23: mol_type = other RNA
  modified_base 1: mod_base = OTHER; note = 2'-O-methyluridine-3'-phosphorothioate 5'-(E)-Vinylphosphonate
  modified_base 2: mod_base = OTHER; note = 2'-deoxy-2'-fluoroadenosine-3'-phosphorothioate
  modified_base 3: mod_base = OTHER; note = 2'-O-methylguanosine-3'-phosphate
  modified_base 4: mod_base = OTHER; note = 2'-O-methylcytidine-3'-phosphate
  modified_base 5: mod_base = OTHER; note = 2'-O-methyladenosine-3'-phosphate
  modified_base 6: mod_base = OTHER; note = 2'-deoxy-2'-fluoroguanosine-3'-phosphate
  modified_base 7: mod_base = OTHER; note = 2'-O-methyluridine-3'-phosphate
  modified_base 8: mod_base = OTHER; note = 2'-deoxy-2'-fluorouridine-3'-phosphate
  modified_base 9: mod_base = OTHER; note = 2'-deoxy-2'-fluorocytidine-3'-phosphate
  modified_base 10: mod_base = OTHER; note = 2'-O-methyladenosine-3'-phosphate
  modified_base 11: mod_base = OTHER; note = 2'-O-methyluridine-3'-phosphate
  modified_base 12: mod_base = OTHER; note = 2'-O-methyluridine-3'-phosphate
  modified_base 13: mod_base = OTHER; note = 2'-O-methylguanosine-3'-phosphate
  modified_base 14: mod_base = OTHER; note = 2'-deoxy-2'-fluorouridine-3'-phosphate
  modified_base 15: mod_base = OTHER; note = 2'-O-methyladenosine-3'-phosphate
  modified_base 16: mod_base = OTHER; note = 2'-deoxy-2'-fluorocytidine-3'-phosphate
  modified_base 17: mod_base = OTHER; note = 2'-O-methyluridine-3'-phosphate
  modified_base 18: mod_base = OTHER; note = 2'-O-methylcytidine-3'-phosphate
  modified_base 19: mod_base = OTHER; note = 2'-O-methylcytidine-3'-phosphate
  modified_base 20: mod_base = OTHER; note = 2'-O-methylcytidine-3'-phosphate
  modified_base 21: mod_base = OTHER; note = 2'-O-methylguanosine-3'-phosphorothioate
  modified_base 22: mod_base = OTHER; note = 2'-O-methylguanosine-3'-phosphorothioate
  modified_base 23: mod_base = OTHER; note = 2'-O-methylguanosine
tagcagttcattgtactcccggg

SEQ ID NO: 763 - RNA, 23 nt, synthetic construct
  source 1..23: mol_type = other RNA
  modified_base 1: mod_base = OTHER; note = 2'-O-methyluridine-3'-phosphorothioate 5'-(E)-Vinylphosphonate
  modified_base 2: mod_base = OTHER; note = 2'-deoxy-2'-fluorouridine-3'-phosphorothioate
  modified_base 3: mod_base = OTHER; note = 2'-O-methyluridine-3'-phosphate
  modified_base 4: mod_base = OTHER; note = 2'-O-methylguanosine-3'-phosphate
  modified_base 5: mod_base = OTHER; note = 2'-O-methyladenosine-3'-phosphate
  modified_base 6: mod_base = OTHER; note = 2'-deoxy-2'-fluoroadenosine-3'-phosphate
  modified_base 7: mod_base = OTHER; note = 2'-O-methylcytidine-3'-phosphate
  modified_base 8: mod_base = OTHER; note = 2'-deoxy-2'-fluoroadenosine-3'-phosphate
  modified_base 9: mod_base = OTHER; note = 2'-deoxy-2'-fluoroguanosine-3'-phosphate
  modified_base 10: mod_base = OTHER; note = 2'-O-methylcytidine-3'-phosphate
  modified_base 11: mod_base = OTHER; note = 2'-O-methyladenosine-3'-phosphate
  modified_base 12: mod_base = OTHER; note = 2'-O-methylguanosine-3'-phosphate
  modified_base 13: mod_base = OTHER; note = 2'-O-methylguanosine-3'-phosphate
  modified_base 14: mod_base = OTHER; note = 2'-deoxy-2'-fluorouridine-3'-phosphate
  modified_base 15: mod_base = OTHER; note = 2'-O-methylguanosine-3'-phosphate
  modified_base 16: mod_base = OTHER; note = 2'-deoxy-2'-fluoroadenosine-3'-phosphate
  modified_base 17: mod_base = OTHER; note = 2'-O-methyluridine-3'-phosphate
  modified_base 18: mod_base = OTHER; note = 2'-O-methyluridine-3'-phosphate
  modified_base 19: mod_base = OTHER; note = 2'-O-methyluridine-3'-phosphate
  modified_base 20: mod_base = OTHER; note = 2'-O-methylguanosine-3'-phosphate
  modified_base 21: mod_base = OTHER; note = 2'-O-methyluridine-3'-phosphorothioate
  modified_base 22: mod_base = OTHER; note = 2'-O-methyluridine-3'-phosphorothioate
  modified_base 23: mod_base = OTHER; note = 2'-O-methylcytidine
tttgaacagcaggtgatttgttc

SEQ ID NO: 764 - RNA, 23 nt, synthetic construct
  source 1..23: mol_type = other RNA
  modified_base 1: mod_base = OTHER; note = 2'-O-methyluridine-3'-phosphorothioate 5'-(E)-Vinylphosphonate
  modified_base 2: mod_base = OTHER; note = 2'-deoxy-2'-fluorocytidine-3'-phosphorothioate
  modified_base 3: mod_base = OTHER; note = 2'-O-methyluridine-3'-phosphate
  modified_base 4: mod_base = OTHER; note = 2'-O-methylguanosine-3'-phosphate
  modified_base 5: mod_base = OTHER; note = 2'-O-methylcytidine-3'-phosphate
  modified_base 6: mod_base = OTHER; note = 2'-deoxy-2'-fluorocytidine-3'-phosphate
  modified_base 7: mod_base = OTHER; note = 2'-O-methylguanosine-3'-phosphate
  modified_base 8: mod_base = OTHER; note = 2'-deoxy-2'-fluoroguanosine-3'-phosphate
  modified_base 9: mod_base = OTHER; note = 2'-deoxy-2'-fluorouridine-3'-phosphate
  modified_base 10: mod_base = OTHER; note = 2'-O-methyladenosine-3'-phosphate
  modified_base 11: mod_base = OTHER; note = 2'-O-methyladenosine-3'-phosphate
  modified_base 12: mod_base = OTHER; note = 2'-O-methylguanosine-3'-phosphate
  modified_base 13: mod_base = OTHER; note = 2'-O-methyluridine-3'-phosphate
  modified_base 14: mod_base = OTHER; note = 2'-deoxy-2'-fluorocytidine-3'-phosphate
  modified_base 15: mod_base = OTHER; note = 2'-O-methylcytidine-3'-phosphate
  modified_base 16: mod_base = OTHER; note = 2'-deoxy-2'-fluoroadenosine-3'-phosphate
  modified_base 17: mod_base = OTHER; note = 2'-O-methylguanosine-3'-phosphate
  modified_base 18: mod_base = OTHER; note = 2'-O-methylguanosine-3'-phosphate
  modified_base 19: mod_base = OTHER; note = 2'-O-methyluridine-3'-phosphate
  modified_base 20: mod_base = OTHER; note = 2'-O-methyladenosine-3'-phosphate
  modified_base 21: mod_base = OTHER; note = 2'-O-methylguanosine-3'-phosphorothioate
  modified_base 22: mod_base = OTHER; note = 2'-O-methyladenosine-3'-phosphorothioate
  modified_base 23: mod_base = OTHER; note = 2'-O-methyladenosine
tctgccggtaagtccaggtagaa

SEQ ID NO: 765 - RNA, 23 nt, synthetic construct
  source 1..23: mol_type = other RNA
  modified_base 1: mod_base = OTHER; note = 2'-O-methyluridine-3'-phosphorothioate 5'-(E)-Vinylphosphonate
  modified_base 2: mod_base = OTHER; note = 2'-deoxy-2'-fluoroadenosine-3'-phosphorothioate
  modified_base 3: mod_base = OTHER; note = 2'-O-methylcytidine-3'-phosphate
  modified_base 4: mod_base = OTHER; note = 2'-O-methyladenosine-3'-phosphate
  modified_base 5: mod_base = OTHER; note = 2'-O-methylguanosine-3'-phosphate
  modified_base 6: mod_base = OTHER; note = 2'-deoxy-2'-fluoroguanosine-3'-phosphate
  modified_base 7: mod_base = OTHER; note = 2'-O-methyladenosine-3'-phosphate
  modified_base 8: mod_base = OTHER; note = 2'-deoxy-2'-fluoroadenosine-3'-phosphate
  modified_base 9: mod_base = OTHER; note = 2'-deoxy-2'-fluorouridine-3'-phosphate
  modified_base 10: mod_base = OTHER; note = 2'-O-methylguanosine-3'-phosphate
  modified_base 11: mod_base = OTHER; note = 2'-O-methylcytidine-3'-phosphate
  modified_base 12: mod_base = OTHER; note = 2'-O-methyluridine-3'-phosphate
  modified_base 13: mod_base = OTHER; note = 2'-O-methylguanosine-3'-phosphate
  modified_base 14: mod_base = OTHER; note = 2'-deoxy-2'-fluoroadenosine-3'-phosphate
  modified_base 15: mod_base = OTHER; note = 2'-O-methylcytidine-3'-phosphate
  modified_base 16: mod_base = OTHER; note = 2'-deoxy-2'-fluoroadenosine-3'-phosphate
  modified_base 17: mod_base = OTHER; note = 2'-O-methyluridine-3'-phosphate
  modified_base 18: mod_base = OTHER; note = 2'-O-methylcytidine-3'-phosphate
  modified_base 19: mod_base = OTHER; note = 2'-O-methylguanosine-3'-phosphate
  modified_base 20: mod_base = OTHER; note = 2'-O-methyluridine-3'-phosphate
  modified_base 21: mod_base = OTHER; note = 2'-O-methyladenosine-3'-phosphorothioate
  modified_base 22: mod_base = OTHER; note = 2'-O-methylguanosine-3'-phosphorothioate
  modified_base 23: mod_base = OTHER; note = 2'-O-methylcytidine
tacaggaatgctgacatcgtagc

SEQ ID NO: 766 - RNA, 23 nt, synthetic construct
  source 1..23: mol_type = other RNA
  modified_base 1: mod_base = OTHER; note = 2'-O-methyluridine-3'-phosphorothioate 5'-(E)-Vinylphosphonate
  modified_base 2: mod_base = OTHER; note = 2'-deoxy-2'-fluoroguanosine-3'-phosphorothioate
  modified_base 3: mod_base = OTHER; note = 2'-O-methylcytidine-3'-phosphate
  modified_base 4: mod_base = OTHER; note = 2'-O-methyluridine-3'-phosphate
  modified_base 5: mod_base = OTHER; note = 2'-O-methylguanosine-3'-phosphate
  modified_base 6: mod_base = OTHER; note = 2'-deoxy-2'-fluoroadenosine-3'-phosphate
  modified_base 7: mod_base = OTHER; note = 2'-O-methyladenosine-3'-phosphate
  modified_base 8: mod_base = OTHER; note = 2'-deoxy-2'-fluoroadenosine-3'-phosphate
  modified_base 9: mod_base = OTHER; note = 2'-deoxy-2'-fluoroadenosine-3'-phosphate
  modified_base 10: mod_base = OTHER; note = 2'-O-methylcytidine-3'-phosphate
  modified_base 11: mod_base = OTHER; note = 2'-O-methyladenosine-3'-phosphate
  modified_base 12: mod_base = OTHER; note = 2'-O-methylguanosine-3'-phosphate
  modified_base 13: mod_base = OTHER; note = 2'-O-methylguanosine-3'-phosphate
  modified_base 14: mod_base = OTHER; note = 2'-deoxy-2'-fluoroadenosine-3'-phosphate
  modified_base 15: mod_base = OTHER; note = 2'-O-methyladenosine-3'-phosphate
  modified_base 16: mod_base = OTHER; note = 2'-deoxy-2'-fluorouridine-3'-phosphate
  modified_base 17: mod_base = OTHER; note = 2'-O-methylguanosine-3'-phosphate
  modified_base 18: mod_base = OTHER; note = 2'-O-methylcytidine-3'-phosphate
  modified_base 19: mod_base = OTHER; note = 2'-O-methyluridine-3'-phosphate
  modified_base 20: mod_base = OTHER; note = 2'-O-methylguanosine-3'-phosphate
  modified_base 21: mod_base = OTHER; note = 2'-O-methyladenosine-3'-phosphorothioate
  modified_base 22: mod_base = OTHER; note = 2'-O-methylcytidine-3'-phosphorothioate
  modified_base 23: mod_base = OTHER; note = 2'-O-methyladenosine
tgctgaaaacaggaatgctgaca

SEQ ID NO: 767 - RNA, 23 nt, synthetic construct
  source 1..23: mol_type = other RNA
  modified_base 1: mod_base = OTHER; note = 2'-O-methyluridine-3'-phosphorothioate 5'-(E)-Vinylphosphonate
  modified_base 2: mod_base = OTHER; note = 2'-deoxy-2'-fluorouridine-3'-phosphorothioate
  modified_base 3: mod_base = OTHER; note = 2'-O-methylguanosine-3'-phosphate
  modified_base 4: mod_base = OTHER; note = 2'-O-methylguanosine-3'-phosphate
  modified_base 5: mod_base = OTHER; note = 2'-O-methylcytidine-3'-phosphate
  modified_base 6: mod_base = OTHER; note = 2'-deoxy-2'-fluorocytidine-3'-phosphate
  modified_base 7: mod_base = OTHER; note = 2'-O-methyladenosine-3'-phosphate
  modified_base 8: mod_base = OTHER; note = 2'-deoxy-2'-fluorouridine-3'-phosphate
  modified_base 9: mod_base = OTHER; note = 2'-deoxy-2'-fluorocytidine-3'-phosphate
  modified_base 10: mod_base = OTHER; note = 2'-O-methyluridine-3'-phosphate
  modified_base 11: mod_base = OTHER; note = 2'-O-methylguanosine-3'-phosphate
  modified_base 12: mod_base = OTHER; note = 2'-O-methyladenosine-3'-phosphate
  modified_base 13: mod_base = OTHER; note = 2'-O-methylguanosine-3'-phosphate
  modified_base 14: mod_base = OTHER; note = 2'-deoxy-2'-fluoroadenosine-3'-phosphate
  modified_base 15: mod_base = OTHER; note = 2'-O-methylguanosine-3'-phosphate
  modified_base 16: mod_base = OTHER; note = 2'-deoxy-2'-fluoroguanosine-3'-phosphate
  modified_base 17: mod_base = OTHER; note = 2'-O-methyladenosine-3'-phosphate
  modified_base 18: mod_base = OTHER; note = 2'-O-methylcytidine-3'-phosphate
  modified_base 19: mod_base = OTHER; note = 2'-O-methyladenosine-3'-phosphate
  modified_base 20: mod_base = OTHER; note = 2'-O-methylguanosine-3'-phosphate
  modified_base 21: mod_base = OTHER; note = 2'-O-methyluridine-3'-phosphorothioate
  modified_base 22: mod_base = OTHER; note = 2'-O-methyladenosine-3'-phosphorothioate
  modified_base 23: mod_base = OTHER; note = 2'-O-methylguanosine
ttggccatctgagaggacagtag

SEQ ID NO: 768 - RNA, 23 nt, synthetic construct
  source 1..23: mol_type = other RNA
  modified_base 1: mod_base = OTHER; note = 2'-O-methyluridine-3'-phosphorothioate 5'-(E)-Vinylphosphonate
  modified_base 2: mod_base = OTHER; note = 2'-deoxy-2'-fluoroguanosine-3'-phosphorothioate
  modified_base 3: mod_base = OTHER; note = 2'-O-methyluridine-3'-phosphate
  modified_base 4: mod_base = OTHER; note = 2'-O-methyluridine-3'-phosphate
  modified_base 5: mod_base = OTHER; note = 2'-O-methylcytidine-3'-phosphate
  modified_base 6: mod_base = OTHER; note = 2'-deoxy-2'-fluorocytidine-3'-phosphate
  modified_base 7: mod_base = OTHER; note = 2'-O-methyluridine-3'-phosphate
  modified_base 8: mod_base = OTHER; note = 2'-deoxy-2'-fluorocytidine-3'-phosphate
  modified_base 9: mod_base = OTHER; note = 2'-deoxy-2'-fluorouridine-3'-phosphate
  modified_base 10: mod_base = OTHER; note = 2'-O-methylcytidine-3'-phosphate
  modified_base 11: mod_base = OTHER; note = 2'-O-methyluridine-3'-phosphate
  modified_base 12: mod_base = OTHER; note = 2'-O-methylguanosine-3'-phosphate
  modified_base 13: mod_base = OTHER; note = 2'-O-methyluridine-3'-phosphate
  modified_base 14: mod_base = OTHER; note = 2'-deoxy-2'-fluoroadenosine-3'-phosphate
  modified_base 15: mod_base = OTHER; note = 2'-O-methylcytidine-3'-phosphate
  modified_base 16: mod_base = OTHER; note = 2'-deoxy-2'-fluorouridine-3'-phosphate
  modified_base 17: mod_base = OTHER; note = 2'-O-methylcytidine-3'-phosphate
  modified_base 18: mod_base = OTHER; note = 2'-O-methyladenosine-3'-phosphate
  modified_base 19: mod_base = OTHER; note = 2'-O-methylguanosine-3'-phosphate
  modified_base 20: mod_base = OTHER; note = 2'-O-methylguanosine-3'-phosphate
  modified_base 21: mod_base = OTHER; note = 2'-O-methylguanosine-3'-phosphorothioate
  modified_base 22: mod_base = OTHER; note = 2'-O-methyluridine-3'-phosphorothioate
  modified_base 23: mod_base = OTHER; note = 2'-O-methylguanosine
tgttcctctctgtactcagggtg

SEQ ID NO: 769 - RNA, 23 nt, synthetic construct
  source 1..23: mol_type = other RNA
  modified_base 1: mod_base = OTHER; note = 2'-O-methyluridine-3'-phosphorothioate 5'-(E)-Vinylphosphonate
  modified_base 2: mod_base = OTHER; note = 2'-deoxy-2'-fluoroguanosine-3'-phosphorothioate
  modified_base 3: mod_base = OTHER; note = 2'-O-methylguanosine-3'-phosphate
  modified_base 4: mod_base = OTHER; note = 2'-O-methylcytidine-3'-phosphate
  modified_base 5: mod_base = OTHER; note = 2'-O-methyluridine-3'-phosphate
  modified_base 6: mod_base = OTHER; note = 2'-deoxy-2'-fluorouridine-3'-phosphate
  modified_base 7: mod_base = OTHER; note = 2'-O-methylcytidine-3'-phosphate
  modified_base 8: mod_base = OTHER; note = 2'-deoxy-2'-fluorouridine-3'-phosphate
  modified_base 9: mod_base = OTHER; note = 2'-deoxy-2'-fluoroadenosine-3'-phosphate
  modified_base 10: mod_base = OTHER; note = 2'-O-methylguanosine-3'-phosphate
  modified_base 11: mod_base = OTHER; note = 2'-O-methyluridine-3'-phosphate
  modified_base 12: mod_base = OTHER; note = 2'-O-methyluridine-3'-phosphate
  modified_base 13: mod_base = OTHER; note = 2'-O-methylcytidine-3'-phosphate
  modified_base 14: mod_base = OTHER; note = 2'-deoxy-2'-fluorocytidine-3'-phosphate
  modified_base 15: mod_base = OTHER; note = 2'-O-methyluridine-3'-phosphate
  modified_base 16: mod_base = OTHER; note = 2'-deoxy-2'-fluorocytidine-3'-phosphate
  modified_base 17: mod_base = OTHER; note = 2'-O-methyluridine-3'-phosphate
  modified_base 18: mod_base = OTHER; note = 2'-O-methylcytidine-3'-phosphate
  modified_base 19: mod_base = OTHER; note = 2'-O-methyluridine-3'-phosphate
  modified_base 20: mod_base = OTHER; note = 2'-O-methylguanosine-3'-phosphate
  modified_base 21: mod_base = OTHER; note = 2'-O-methyluridine-3'-phosphorothioate
  modified_base 22: mod_base = OTHER; note = 2'-O-methyladenosine-3'-phosphorothioate
  modified_base 23: mod_base = OTHER; note = 2'-O-methylcytidine
tggcttctagttcctctctgtac

SEQ ID NO: 770 - RNA, 23 nt, synthetic construct
  source 1..23: mol_type = other RNA
  modified_base 1: mod_base = OTHER; note = 2'-O-methyluridine-3'-phosphorothioate 5'-(E)-Vinylphosphonate
  modified_base 2: mod_base = OTHER; note = 2'-deoxy-2'-fluorouridine-3'-phosphorothioate
  modified_base 3: mod_base = OTHER; note = 2'-O-methylguanosine-3'-phosphate
  modified_base 4: mod_base = OTHER; note = 2'-O-methylcytidine-3'-phosphate
  modified_base 5: mod_base = OTHER; note = 2'-O-methyladenosine-3'-phosphate
  modified_base 6: mod_base = OTHER; note = 2'-deoxy-2'-fluorouridine-3'-phosphate
  modified_base 7: mod_base = OTHER; note = 2'-O-methyluridine-3'-phosphate
  modified_base 8: mod_base = OTHER; note = 2'-deoxy-2'-fluorouridine-3'-phosphate
  modified_base 9: mod_base = OTHER; note = 2'-deoxy-2'-fluoroguanosine-3'-phosphate
  modified_base 10: mod_base = OTHER; note = 2'-O-methyluridine-3'-phosphate
  modified_base 11: mod_base = OTHER; note = 2'-O-methylcytidine-3'-phosphate
  modified_base 12: mod_base = OTHER; note = 2'-O-methylcytidine-3'-phosphate
  modified_base 13: mod_base = OTHER; note = 2'-O-methyladenosine-3'-phosphate
  modified_base 14: mod_base = OTHER; note = 2'-deoxy-2'-fluoroadenosine-3'-phosphate
  modified_base 15: mod_base = OTHER; note = 2'-O-methylguanosine-3'-phosphate
  modified_base 16: mod_base = OTHER; note = 2'-deoxy-2'-fluoroadenosine-3'-phosphate
  modified_base 17: mod_base = OTHER; note = 2'-O-methylcytidine-3'-phosphate
  modified_base 18: mod_base = OTHER; note = 2'-O-methyluridine-3'-phosphate
  modified_base 19: mod_base = OTHER; note = 2'-O-methyladenosine-3'-phosphate
  modified_base 20: mod_base = OTHER; note = 2'-O-methyladenosine-3'-phosphate
  modified_base 21: mod_base = OTHER; note = 2'-O-methylcytidine-3'-phosphorothioate
  modified_base 22: mod_base = OTHER; note = 2'-O-methyladenosine-3'-phosphorothioate
  modified_base 23: mod_base = OTHER; note = 2'-O-methylcytidine
ttgcatttgtccaagactaacac

SEQ ID NO: 771 - RNA, 23 nt, synthetic construct
  source 1..23: mol_type = other RNA
  modified_base 1: mod_base = OTHER; note = 2'-O-methyluridine-3'-phosphorothioate 5'-(E)-Vinylphosphonate
  modified_base 2: mod_base = OTHER; note = 2'-deoxy-2'-fluoroguanosine-3'-phosphorothioate
  modified_base 3: mod_base = OTHER; note = 2'-O-methyladenosine-3'-phosphate
  modified_base 4: mod_base = OTHER; note = 2'-O-methylguanosine-3'-phosphate
  modified_base 5: mod_base = OTHER; note = 2'-O-methyladenosine-3'-phosphate
  modified_base 6: mod_base = OTHER; note = 2'-deoxy-2'-fluorouridine-3'-phosphate
  modified_base 7: mod_base = OTHER; note = 2'-O-methyluridine-3'-phosphate
  modified_base 8: mod_base = OTHER; note = 2'-deoxy-2'-fluoroguanosine-3'-phosphate
  modified_base 9: mod_base = OTHER; note = 2'-deoxy-2'-fluoroguanosine-3'-phosphate
  modified_base 10: mod_base = OTHER; note = 2'-O-methyluridine-3'-phosphate
  modified_base 11: mod_base = OTHER; note = 2'-O-methylguanosine-3'-phosphate
  modified_base 12: mod_base = OTHER; note = 2'-O-methylcytidine-3'-phosphate
  modified_base 13: mod_base = OTHER; note = 2'-O-methyladenosine-3'-phosphate
  modified_base 14: mod_base = OTHER; note = 2'-deoxy-2'-fluorouridine-3'-phosphate
  modified_base 15: mod_base = OTHER; note = 2'-O-methyluridine-3'-phosphate
  modified_base 16: mod_base = OTHER; note = 2'-deoxy-2'-fluorouridine-3'-phosphate
  modified_base 17: mod_base = OTHER; note = 2'-O-methylguanosine-3'-phosphate
  modified_base 18: mod_base = OTHER; note = 2'-O-methyluridine-3'-phosphate
  modified_base 19: mod_base = OTHER; note = 2'-O-methylcytidine-3'-phosphate
  modified_base 20: mod_base = OTHER; note = 2'-O-methylcytidine-3'-phosphate
  modified_base 21: mod_base = OTHER; note = 2'-O-methyladenosine-3'-phosphorothioate
  modified_base 22: mod_base = OTHER; note = 2'-O-methyladenosine-3'-phosphorothioate
  modified_base 23: mod_base = OTHER; note = 2'-O-methylguanosine
tgagattggtgcatttgtccaag

SEQ ID NO: 772 - RNA, 23 nt, synthetic construct
  source 1..23: mol_type = other RNA
  modified_base 1: mod_base = OTHER; note = 2'-O-methyluridine-3'-phosphorothioate 5'-(E)-Vinylphosphonate
  modified_base 2: mod_base = OTHER; note = 2'-deoxy-2'-fluoroadenosine-3'-phosphorothioate
  modified_base 3: mod_base = OTHER; note = 2'-O-methylguanosine-3'-phosphate
  modified_base 4: mod_base = OTHER; note = 2'-O-methyladenosine-3'-phosphate
  modified_base 5: mod_base = OTHER; note = 2'-O-methylguanosine-3'-phosphate
  modified_base 6: mod_base = OTHER; note = 2'-deoxy-2'-fluoroadenosine-3'-phosphate
  modified_base 7: mod_base = OTHER; note = 2'-O-methyluridine-3'-phosphate
  modified_base 8: mod_base = OTHER; note = 2'-deoxy-2'-fluorouridine-3'-phosphate
  modified_base 9: mod_base = OTHER; note = 2'-deoxy-2'-fluoroguanosine-3'-phosphate
  modified_base 10: mod_base = OTHER; note = 2'-O-methylguanosine-3'-phosphate
  modified_base 11: mod_base = OTHER; note = 2'-O-methyluridine-3'-phosphate
  modified_base 12: mod_base = OTHER; note = 2'-O-methylguanosine-3'-phosphate
  modified_base 13: mod_base = OTHER; note = 2'-O-methylcytidine-3'-phosphate
  modified_base 14: mod_base = OTHER; note = 2'-deoxy-2'-fluoroadenosine-3'-phosphate
  modified_base 15: mod_base = OTHER; note = 2'-O-methyluridine-3'-phosphate
  modified_base 16: mod_base = OTHER; note = 2'-deoxy-2'-fluorouridine-3'-phosphate
  modified_base 17: mod_base = OTHER; note = 2'-O-methyluridine-3'-phosphate
  modified_base 18: mod_base = OTHER; note = 2'-O-methylguanosine-3'-phosphate
  modified_base 19: mod_base = OTHER; note = 2'-O-methyluridine-3'-phosphate
  modified_base 20: mod_base = OTHER; note = 2'-O-methylcytidine-3'-phosphate
  modified_base 21: mod_base = OTHER; note = 2'-O-methylcytidine-3'-phosphorothioate
  modified_base 22: mod_base = OTHER; note = 2'-O-methyladenosine-3'-phosphorothioate
  modified_base 23: mod_base = OTHER; note = 2'-O-methyladenosine
tagagattggtgcatttgtccaa

SEQ ID NO: 773 - RNA, 23 nt, synthetic construct
  source 1..23: mol_type = other RNA
  modified_base 1: mod_base = OTHER; note = 2'-O-methyluridine-3'-phosphorothioate 5'-(E)-Vinylphosphonate
  modified_base 2: mod_base = OTHER; note = 2'-deoxy-2'-fluoroadenosine-3'-phosphorothioate
  modified_base 3: mod_base = OTHER; note = 2'-O-methylcytidine-3'-phosphate
  modified_base 4: mod_base = OTHER; note = 2'-O-methyladenosine-3'-phosphate
  modified_base 5: mod_base = OTHER; note = 2'-O-methyladenosine-3'-phosphate
  modified_base 6: mod_base = OTHER; note = 2'-deoxy-2'-fluoroadenosine-3'-phosphate
  modified_base 7: mod_base = OTHER; note = 2'-O-methyladenosine-3'-phosphate
  modified_base 8: mod_base = OTHER; note = 2'-deoxy-2'-fluoroadenosine-3'-phosphate
  modified_base 9: mod_base = OTHER; note = 2'-deoxy-2'-fluoroguanosine-3'-phosphate
  modified_base 10: mod_base = OTHER; note = 2'-O-methyluridine-3'-phosphate
  modified_base 11: mod_base = OTHER; note = 2'-O-methyladenosine-3'-phosphate
  modified_base 12: mod_base = OTHER; note = 2'-O-methylguanosine-3'-phosphate
  modified_base 13: mod_base = OTHER; note = 2'-O-methylcytidine-3'-phosphate
  modified_base 14: mod_base = OTHER; note = 2'-deoxy-2'-fluorocytidine-3'-phosphate
  modified_base 15: mod_base = OTHER; note = 2'-O-methyluridine-3'-phosphate
  modified_base 16: mod_base = OTHER; note = 2'-deoxy-2'-fluorocytidine-3'-phosphate
  modified_base 17: mod_base = OTHER; note = 2'-O-methylcytidine-3'-phosphate
  modified_base 18: mod_base = OTHER; note = 2'-O-methyluridine-3'-phosphate
  modified_base 19: mod_base = OTHER; note = 2'-O-methylguanosine-3'-phosphate
  modified_base 20: mod_base = OTHER; note = 2'-O-methylcytidine-3'-phosphate
  modified_base 21: mod_base = OTHER; note = 2'-O-methyladenosine-3'-phosphorothioate
  modified_base 22: mod_base = OTHER; note = 2'-O-methylguanosine-3'-phosphorothioate
  modified_base 23: mod_base = OTHER; note = 2'-O-methylcytidine
tacaaaaagtagcctcctgcagc

SEQ ID NO: 774 - RNA, 23 nt, synthetic construct
  source 1..23: mol_type = other RNA
  modified_base 1: mod_base = OTHER; note = 2'-O-methyluridine-3'-phosphorothioate 5'-(E)-Vinylphosphonate
  modified_base 2: mod_base = OTHER; note = 2'-deoxy-2'-fluorouridine-3'-phosphorothioate
  modified_base 3: mod_base = OTHER; note = 2'-O-methyladenosine-3'-phosphate
  modified_base 4: mod_base = OTHER; note = 2'-O-methylcytidine-3'-phosphate
  modified_base 5: mod_base = OTHER; note = 2'-O-methyladenosine-3'-phosphate
  modified_base 6: mod_base = OTHER; note = 2'-deoxy-2'-fluoroadenosine-3'-phosphate
  modified_base 7: mod_base = OTHER; note = 2'-O-methyladenosine-3'-phosphate
  modified_base 8: mod_base = OTHER; note = 2'-deoxy-2'-fluoroadenosine-3'-phosphate
  modified_base 9: mod_base = OTHER; note = 2'-deoxy-2'-fluoroadenosine-3'-phosphate
  modified_base 10: mod_base = OTHER; note = 2'-O-methylguanosine-3'-phosphate
  modified_base 11: mod_base = OTHER; note = 2'-O-methyluridine-3'-phosphate
  modified_base 12: mod_base = OTHER; note = 2'-O-methyladenosine-3'-phosphate
  modified_base 13: mod_base = OTHER; note = 2'-O-methylguanosine-3'-phosphate
  modified_base 14: mod_base = OTHER; note = 2'-deoxy-2'-fluorocytidine-3'-phosphate
  modified_base 15: mod_base = OTHER; note = 2'-O-methylcytidine-3'-phosphate
  modified_base 16: mod_base = OTHER; note = 2'-deoxy-2'-fluorouridine-3'-phosphate
  modified_base 17: mod_base = OTHER; note = 2'-O-methylcytidine-3'-phosphate
  modified_base 18: mod_base = OTHER; note = 2'-O-methylcytidine-3'-phosphate
  modified_base 19: mod_base = OTHER; note = 2'-O-methyluridine-3'-phosphate
  modified_base 20: mod_base = OTHER; note = 2'-O-methylguanosine-3'-phosphate
  modified_base 21: mod_base = OTHER; note = 2'-O-methylcytidine-3'-phosphorothioate
  modified_base 22: mod_base = OTHER; note = 2'-O-methyladenosine-3'-phosphorothioate
  modified_base 23: mod_base = OTHER; note = 2'-O-methylguanosine
ttacaaaaagtagcctcctgcag

SEQ ID NO: 775 - RNA, 23 nt, synthetic construct
  source 1..23: mol_type = other RNA
  modified_base 1: mod_base = OTHER; note = 2'-O-methyluridine-3'-phosphorothioate 5'-(E)-Vinylphosphonate
  modified_base 2: mod_base = OTHER; note = 2'-deoxy-2'-fluoroguanosine-3'-phosphorothioate
  modified_base 3: mod_base = OTHER; note = 2'-O-methyluridine-3'-phosphate
  modified_base 4: mod_base = OTHER; note = 2'-O-methyladenosine-3'-phosphate
  modified_base 5: mod_base = OTHER; note = 2'-O-methylcytidine-3'-phosphate
  modified_base 6: mod_base = OTHER; note = 2'-deoxy-2'-fluoroadenosine-3'-phosphate
  modified_base 7: mod_base = OTHER; note = 2'-O-methyladenosine-3'-phosphate
  modified_base 8: mod_base = OTHER; note = 2'-deoxy-2'-fluoroadenosine-3'-phosphate
  modified_base 9: mod_base = OTHER; note = 2'-deoxy-2'-fluoroadenosine-3'-phosphate
  modified_base 10: mod_base = OTHER; note = 2'-O-methyladenosine-3'-phosphate
  modified_base 11: mod_base = OTHER; note = 2'-O-methylguanosine-3'-phosphate
  modified_base 12: mod_base = OTHER; note = 2'-O-methyluridine-3'-phosphate
  modified_base 13: mod_base = OTHER; note = 2'-O-methyladenosine-3'-phosphate
  modified_base 14: mod_base = OTHER; note = 2'-deoxy-2'-fluoroguanosine-3'-phosphate
  modified_base 15: mod_base = OTHER; note = 2'-O-methylcytidine-3'-phosphate
  modified_base 16: mod_base = OTHER; note = 2'-deoxy-2'-fluorocytidine-3'-phosphate
  modified_base 17: mod_base = OTHER; note = 2'-O-methyluridine-3'-phosphate
  modified_base 18: mod_base = OTHER; note = 2'-O-methylcytidine-3'-phosphate
  modified_base 19: mod_base = OTHER; note = 2'-O-methylcytidine-3'-phosphate
  modified_base 20: mod_base = OTHER; note = 2'-O-methyluridine-3'-phosphate
  modified_base 21: mod_base = OTHER; note = 2'-O-methylguanosine-3'-phosphorothioate
  modified_base 22: mod_base = OTHER; note = 2'-O-methylcytidine-3'-phosphorothioate
  modified_base 23: mod_base = OTHER; note = 2'-O-methyladenosine
tgtacaaaaagtagcctcctgca

SEQ ID NO: 776 - RNA, 23 nt, synthetic construct
  source 1..23: mol_type = other RNA
  modified_base 1: mod_base = OTHER; note = 2'-O-methyluridine-3'-phosphorothioate 5'-(E)-Vinylphosphonate
  modified_base 2: mod_base = OTHER; note = 2'-deoxy-2'-fluorocytidine-3'-phosphorothioate
  modified_base 3: mod_base = OTHER; note = 2'-O-methylguanosine-3'-phosphate
  modified_base 4: mod_base = OTHER; note = 2'-O-methyluridine-3'-phosphate
  modified_base 5: mod_base = OTHER; note = 2'-O-methyladenosine-3'-phosphate
  modified_base 6: mod_base = OTHER; note = 2'-deoxy-2'-fluorocytidine-3'-phosphate
  modified_base 7: mod_base = OTHER; note = 2'-O-methyladenosine-3'-phosphate
  modified_base 8: mod_base = OTHER; note = 2'-deoxy-2'-fluoroadenosine-3'-phosphate
  modified_base 9: mod_base = OTHER; note = 2'-deoxy-2'-fluoroadenosine-3'-phosphate
  modified_base 10: mod_base = OTHER; note = 2'-O-methyladenosine-3'-phosphate
  modified_base 11: mod_base = OTHER; note = 2'-O-methyladenosine-3'-phosphate
  modified_base 12: mod_base = OTHER; note = 2'-O-methylguanosine-3'-phosphate
  modified_base 13: mod_base = OTHER; note = 2'-O-methyluridine-3'-phosphate
  modified_base 14: mod_base = OTHER; note = 2'-deoxy-2'-fluoroadenosine-3'-phosphate
  modified_base 15: mod_base = OTHER; note = 2'-O-methylguanosine-3'-phosphate
  modified_base 16: mod_base = OTHER; note = 2'-deoxy-2'-fluorocytidine-3'-phosphate
  modified_base 17: mod_base = OTHER; note = 2'-O-methylcytidine-3'-phosphate
  modified_base 18: mod_base = OTHER; note = 2'-O-methyluridine-3'-phosphate
  modified_base 19: mod_base = OTHER; note = 2'-O-methylcytidine-3'-phosphate
  modified_base 20: mod_base = OTHER; note = 2'-O-methylcytidine-3'-phosphate
  modified_base 21: mod_base = OTHER; note = 2'-O-methyluridine-3'-phosphorothioate
  modified_base 22: mod_base = OTHER; note = 2'-O-methylguanosine-3'-phosphorothioate
  modified_base 23: mod_base = OTHER; note = 2'-O-methylcytidine
tcgtacaaaaagtagcctcctgc

SEQ ID NO: 777 - RNA, 23 nt, synthetic construct
  source 1..23: mol_type = other RNA
  modified_base 1: mod_base = OTHER; note = 2'-O-methyluridine-3'-phosphorothioate 5'-(E)-Vinylphosphonate
  modified_base 2: mod_base = OTHER; note = 2'-deoxy-2'-fluorocytidine-3'-phosphorothioate
  modified_base 3: mod_base = OTHER; note = 2'-O-methylcytidine-3'-phosphate
  modified_base 4: mod_base = OTHER; note = 2'-O-methylguanosine-3'-phosphate
  modified_base 5: mod_base = OTHER; note = 2'-O-methyluridine-3'-phosphate
  modified_base 6: mod_base = OTHER; note = 2'-deoxy-2'-fluoroadenosine-3'-phosphate
  modified_base 7: mod_base = OTHER; note = 2'-O-methylcytidine-3'-phosphate
  modified_base 8: mod_base = OTHER; note = 2'-deoxy-2'-fluoroadenosine-3'-phosphate
  modified_base 9: mod_base = OTHER; note = 2'-deoxy-2'-fluoroadenosine-3'-phosphate
  modified_base 10: mod_base = OTHER; note = 2'-O-methyladenosine-3'-phosphate
  modified_base 11: mod_base = OTHER; note = 2'-O-methyladenosine-3'-phosphate
  modified_base 12: mod_base = OTHER; note = 2'-O-methyladenosine-3'-phosphate
  modified_base 13: mod_base = OTHER; note = 2'-O-methylguanosine-3'-phosphate
  modified_base 14: mod_base = OTHER; note = 2'-deoxy-2'-fluorouridine-3'-phosphate
  modified_base 15: mod_base = OTHER; note = 2'-O-methyladenosine-3'-phosphate
  modified_base 16: mod_base = OTHER; note = 2'-deoxy-2'-fluoroguanosine-3'-phosphate
  modified_base 17: mod_base = OTHER; note = 2'-O-methylcytidine-3'-phosphate
  modified_base 18: mod_base = OTHER; note = 2'-O-methylcytidine-3'-phosphate
  modified_base 19: mod_base = OTHER; note = 2'-O-methyluridine-3'-phosphate
  modified_base 20: mod_base = OTHER; note = 2'-O-methylcytidine-3'-phosphate
  modified_base 21: mod_base = OTHER; note = 2'-O-methylcytidine-3'-phosphorothioate
  modified_base 22: mod_base = OTHER; note = 2'-O-methyluridine-3'-phosphorothioate
  modified_base 23: mod_base = OTHER; note = 2'-O-methylguanosine
tccgtacaaaaagtagcctcctg

SEQ ID NO: 778 - RNA, 23 nt, synthetic construct
  source 1..23: mol_type = other RNA
  modified_base 1: mod_base = OTHER; note = 2'-O-methyluridine-3'-phosphorothioate 5'-(E)-Vinylphosphonate
  modified_base 2: mod_base = OTHER; note = 2'-deoxy-2'-fluoroadenosine-3'-phosphorothioate
  modified_base 3: mod_base = OTHER; note = 2'-O-methylcytidine-3'-phosphate
  modified_base 4: mod_base = OTHER; note = 2'-O-methylcytidine-3'-phosphate
  modified_base 5: mod_base = OTHER; note = 2'-O-methylguanosine-3'-phosphate
  modified_base 6: mod_base = OTHER; note = 2'-deoxy-2'-fluorouridine-3'-phosphate
  modified_base 7: mod_base = OTHER; note = 2'-O-methyladenosine-3'-phosphate
  modified_base 8: mod_base = OTHER; note = 2'-deoxy-2'-fluorocytidine-3'-phosphate
  modified_base 9: mod_base = OTHER; note = 2'-deoxy-2'-fluoroadenosine-3'-phosphate
  modified_base 10: mod_base = OTHER; note = 2'-O-methyladenosine-3'-phosphate
  modified_base 11: mod_base = OTHER; note = 2'-O-methyladenosine-3'-phosphate
  modified_base 12: mod_base = OTHER; note = 2'-O-methyladenosine-3'-phosphate
  modified_base 13: mod_base = OTHER; note = 2'-O-methyladenosine-3'-phosphate
  modified_base 14: mod_base = OTHER; note = 2'-deoxy-2'-fluoroguanosine-3'-phosphate
  modified_base 15: mod_base = OTHER; note = 2'-O-methyluridine-3'-phosphate
  modified_base 16: mod_base = OTHER; note = 2'-deoxy-2'-fluoroadenosine-3'-phosphate
  modified_base 17: mod_base = OTHER; note = 2'-O-methylguanosine-3'-phosphate
  modified_base 18: mod_base = OTHER; note = 2'-O-methylcytidine-3'-phosphate
  modified_base 19: mod_base = OTHER; note = 2'-O-methylcytidine-3'-phosphate
  modified_base 20: mod_base = OTHER; note = 2'-O-methyluridine-3'-phosphate
  modified_base 21: mod_base = OTHER; note = 2'-O-methylcytidine-3'-phosphorothioate
  modified_base 22: mod_base = OTHER; note = 2'-O-methylcytidine-3'-phosphorothioate
  modified_base 23: mod_base = OTHER; note = 2'-O-methyluridine
taccgtacaaaaagtagcctcct

SEQ ID NO: 779 - RNA, 23 nt, synthetic construct
  source 1..23: mol_type = other RNA
  modified_base 1: mod_base = OTHER; note = 2'-O-methyluridine-3'-phosphorothioate 5'-(E)-Vinylphosphonate
  modified_base 2: mod_base = OTHER; note = 2'-deoxy-2'-fluoroguanosine-3'-phosphorothioate
  modified_base 3: mod_base = OTHER; note = 2'-O-methylcytidine-3'-phosphate
  modified_base 4: mod_base = OTHER; note = 2'-O-methyladenosine-3'-phosphate
  modified_base 5: mod_base = OTHER; note = 2'-O-methyladenosine-3'-phosphate
  modified_base 6: mod_base = OTHER; note = 2'-deoxy-2'-fluorouridine-3'-phosphate
  modified_base 7: mod_base = OTHER; note = 2'-O-methylguanosine-3'-phosphate
  modified_base 8: mod_base = OTHER; note = 2'-deoxy-2'-fluoroadenosine-3'-phosphate
  modified_base 9: mod_base = OTHER; note = 2'-deoxy-2'-fluorocytidine-3'-phosphate
  modified_base 10: mod_base = OTHER; note = 2'-O-methyladenosine-3'-phosphate
  modified_base 11: mod_base = OTHER; note = 2'-O-methyladenosine-3'-phosphate
  modified_base 12: mod_base = OTHER; note = 2'-O-methylcytidine-3'-phosphate
  modified_base 13: mod_base = OTHER; note = 2'-O-methyluridine-3'-phosphate
  modified_base 14: mod_base = OTHER; note = 2'-deoxy-2'-fluoroguanosine-3'-phosphate
  modified_base 15: mod_base = OTHER; note = 2'-O-methylguanosine-3'-phosphate
  modified_base 16: mod_base = OTHER; note = 2'-deoxy-2'-fluoroguanosine-3'-phosphate
  modified_base 17: mod_base = OTHER; note = 2'-O-methyladenosine-3'-phosphate
  modified_base 18: mod_base = OTHER; note = 2'-O-methylcytidine-3'-phosphate
  modified_base 19: mod_base = OTHER; note = 2'-O-methyladenosine-3'-phosphate
  modified_base 20: mod_base = OTHER; note = 2'-O-methylcytidine-3'-phosphate
  modified_base 21: mod_base = OTHER; note = 2'-O-methyladenosine-3'-phosphorothioate
  modified_base 22: mod_base = OTHER; note = 2'-O-methylguanosine-3'-phosphorothioate
  modified_base 23: mod_base = OTHER; note = 2'-O-methylcytidine
tgcaatgacaactgggacacagc

SEQ ID NO: 780 - RNA, 23 nt, synthetic construct
  source 1..23: mol_type = other RNA
  modified_base 1: mod_base = OTHER; note = 2'-O-methyluridine-3'-phosphorothioate 5'-(E)-Vinylphosphonate
  modified_base 2: mod_base = OTHER; note = 2'-deoxy-2'-fluoroadenosine-3'-phosphorothioate
  modified_base 3: mod_base = OTHER; note = 2'-O-methylguanosine-3'-phosphate
  modified_base 4: mod_base = OTHER; note = 2'-O-methyluridine-3'-phosphate
  modified_base 5: mod_base = OTHER; note = 2'-O-methylcytidine-3'-phosphate
  modified_base 6: mod_base = OTHER; note = 2'-deoxy-2'-fluorouridine-3'-phosphate
  modified_base 7: mod_base = OTHER; note = 2'-O-methylguanosine-3'-phosphate
  modified_base 8: mod_base = OTHER; note = 2'-deoxy-2'-fluorocytidine-3'-phosphate
  modified_base 9: mod_base = OTHER; note = 2'-deoxy-2'-fluoroadenosine-3'-phosphate
  modified_base 10: mod_base = OTHER; note = 2'-O-methyladenosine-3'-phosphate
  modified_base 11: mod_base = OTHER; note = 2'-O-methyluridine-3'-phosphate
  modified_base 12: mod_base = OTHER; note = 2'-O-methylguanosine-3'-phosphate
  modified_base 13: mod_base = OTHER; note = 2'-O-methyladenosine-3'-phosphate
  modified_base 14: mod_base = OTHER; note = 2'-deoxy-2'-fluorocytidine-3'-phosphate
  modified_base 15: mod_base = OTHER; note = 2'-O-methyladenosine-3'-phosphate
  modified_base 16: mod_base = OTHER; note = 2'-deoxy-2'-fluoroadenosine-3'-phosphate
  modified_base 17: mod_base = OTHER; note = 2'-O-methylcytidine-3'-phosphate
  modified_base 18: mod_base = OTHER; note = 2'-O-methyluridine-3'-phosphate
  modified_base 19: mod_base = OTHER; note = 2'-O-methylguanosine-3'-phosphate
  modified_base 20: mod_base = OTHER; note = 2'-O-methylguanosine-3'-phosphate
  modified_base 21: mod_base = OTHER; note = 2'-O-methylguanosine-3'-phosphorothioate
  modified_base 22: mod_base = OTHER; note = 2'-O-methyladenosine-3'-phosphorothioate
  modified_base 23: mod_base = OTHER; note = 2'-O-methylcytidine
tagtctgcaatgacaactgggac

SEQ ID NO: 781 - RNA, 23 nt, synthetic construct
  source 1..23: mol_type = other RNA
  modified_base 1: mod_base = OTHER; note = 2'-O-methyluridine-3'-phosphorothioate 5'-(E)-Vinylphosphonate
  modified_base 2: mod_base = OTHER; note = 2'-deoxy-2'-fluoroguanosine-3'-phosphorothioate
  modified_base 3: mod_base = OTHER; note = 2'-O-methyladenosine-3'-phosphate
  modified_base 4: mod_base = OTHER; note = 2'-O-methylguanosine-3'-phosphate
  modified_base 5: mod_base = OTHER; note = 2'-O-methyluridine-3'-phosphate
  modified_base 6: mod_base = OTHER; note = 2'-deoxy-2'-fluorocytidine-3'-phosphate
  modified_base 7: mod_base = OTHER; note = 2'-O-methyluridine-3'-phosphate
  modified_base 8: mod_base = OTHER; note = 2'-deoxy-2'-fluoroguanosine-3'-phosphate
  modified_base 9: mod_base = OTHER; note = 2'-deoxy-2'-fluorocytidine-3'-phosphate
  modified_base 10: mod_base = OTHER; note = 2'-O-methyladenosine-3'-phosphate
  modified_base 11: mod_base = OTHER; note = 2'-O-methyladenosine-3'-phosphate
  modified_base 12: mod_base = OTHER; note = 2'-O-methyluridine-3'-phosphate
  modified_base 13: mod_base = OTHER; note = 2'-O-methylguanosine-3'-phosphate
  modified_base 14: mod_base = OTHER; note = 2'-deoxy-2'-fluoroadenosine-3'-phosphate
  modified_base 15: mod_base = OTHER; note = 2'-O-methylcytidine-3'-phosphate
  modified_base 16: mod_base = OTHER; note = 2'-deoxy-2'-fluoroadenosine-3'-phosphate
  modified_base 17: mod_base = OTHER; note = 2'-O-methyladenosine-3'-phosphate
  modified_base 18: mod_base = OTHER; note = 2'-O-methylcytidine-3'-phosphate
  modified_base 19: mod_base = OTHER; note = 2'-O-methyluridine-3'-phosphate
  modified_base 20: mod_base = OTHER; note = 2'-O-methylguanosine-3'-phosphate
  modified_base 21: mod_base = OTHER; note = 2'-O-methylguanosine-3'-phosphorothioate
  modified_base 22: mod_base = OTHER; note = 2'-O-methylguanosine-3'-phosphorothioate
  modified_base 23: mod_base = OTHER; note = 2'-O-methyladenosine
tgagtctgcaatgacaactggga

SEQ ID NO: 782 - RNA, 23 nt, synthetic construct
  source 1..23: mol_type = other RNA
  modified_base 1: mod_base = OTHER; note = 2'-O-methyluridine-3'-phosphorothioate 5'-(E)-Vinylphosphonate
  modified_base 2: mod_base = OTHER; note = 2'-deoxy-2'-fluorouridine-3'-phosphorothioate
  modified_base 3: mod_base = OTHER; note = 2'-O-methyladenosine-3'-phosphate
  modified_base 4: mod_base = OTHER; note = 2'-O-methyladenosine-3'-phosphate
  modified_base 5: mod_base = OTHER; note = 2'-O-methylguanosine-3'-phosphate
  modified_base 6: mod_base = OTHER; note = 2'-deoxy-2'-fluoroadenosine-3'-phosphate
  modified_base 7: mod_base = OTHER; note = 2'-O-methylguanosine-3'-phosphate
  modified_base 8: mod_base = OTHER; note = 2'-deoxy-2'-fluorouridine-3'-phosphate
  modified_base 9: mod_base = OTHER; note = 2'-deoxy-2'-fluorocytidine-3'-phosphate
  modified_base 10: mod_base = OTHER; note = 2'-O-methyluridine-3'-phosphate
  modified_base 11: mod_base = OTHER; note = 2'-O-methylguanosine-3'-phosphate
  modified_base 12: mod_base = OTHER; note = 2'-O-methylcytidine-3'-phosphate
  modified_base 13: mod_base = OTHER; note = 2'-O-methyladenosine-3'-phosphate
  modified_base 14: mod_base = OTHER; note = 2'-deoxy-2'-fluoroadenosine-3'-phosphate
  modified_base 15: mod_base = OTHER; note = 2'-O-methyluridine-3'-phosphate
  modified_base 16: mod_base = OTHER; note = 2'-deoxy-2'-fluoroguanosine-3'-phosphate
  modified_base 17: mod_base = OTHER; note = 2'-O-methyladenosine-3'-phosphate
  modified_base 18: mod_base = OTHER; note = 2'-O-methylcytidine-3'-phosphate
  modified_base 19: mod_base = OTHER; note = 2'-O-methyladenosine-3'-phosphate
  modified_base 20: mod_base = OTHER; note = 2'-O-methyladenosine-3'-phosphate
  modified_base 21: mod_base = OTHER; note = 2'-O-methylcytidine-3'-phosphorothioate
  modified_base 22: mod_base = OTHER; note = 2'-O-methyluridine-3'-phosphorothioate
  modified_base 23: mod_base = OTHER; note = 2'-O-methylguanosine
ttaagagtctgcaatgacaactg

SEQ ID NO: 783 - RNA, 23 nt, synthetic construct
  source 1..23: mol_type = other RNA
  modified_base 1: mod_base = OTHER; note = 2'-O-methyluridine-3'-phosphorothioate 5'-(E)-Vinylphosphonate
  modified_base 2: mod_base = OTHER; note = 2'-deoxy-2'-fluoroadenosine-3'-phosphorothioate
  modified_base 3: mod_base = OTHER; note = 2'-O-methylguanosine-3'-phosphate
  modified_base 4: mod_base = OTHER; note = 2'-O-methyladenosine-3'-phosphate
  modified_base 5: mod_base = OTHER; note = 2'-O-methyladenosine-3'-phosphate
  modified_base 6: mod_base = OTHER; note = 2'-deoxy-2'-fluoroadenosine-3'-phosphate
  modified_base 7: mod_base = OTHER; note = 2'-O-methylguanosine-3'-phosphate
  modified_base 8: mod_base = OTHER; note = 2'-deoxy-2'-fluoroguanosine-3'-phosphate
  modified_base 9: mod_base = OTHER; note = 2'-deoxy-2'-fluorocytidine-3'-phosphate
  modified_base 10: mod_base = OTHER; note = 2'-O-methyladenosine-3'-phosphate
  modified_base 11: mod_base = OTHER; note = 2'-O-methylguanosine-3'-phosphate
  modified_base 12: mod_base = OTHER; note = 2'-O-methyladenosine-3'-phosphate
  modified_base 13: mod_base = OTHER; note = 2'-O-methyladenosine-3'-phosphate
  modified_base 14: mod_base = OTHER; note = 2'-deoxy-2'-fluorouridine-3'-phosphate
  modified_base 15: mod_base = OTHER; note = 2'-O-methyladenosine-3'-phosphate
  modified_base 16: mod_base = OTHER; note = 2'-deoxy-2'-fluorouridine-3'-phosphate
  modified_base 17: mod_base = OTHER; note = 2'-O-methyladenosine-3'-phosphate
  modified_base 18: mod_base = OTHER; note = 2'-O-methyladenosine-3'-phosphate
  modified_base 19: mod_base = OTHER; note = 2'-O-methylguanosine-3'-phosphate
  modified_base 20: mod_base = OTHER; note = 2'-O-methyladenosine-3'-phosphate
  modified_base 21: mod_base = OTHER; note = 2'-O-methylguanosine-3'-phosphorothioate
  modified_base 22: mod_base = OTHER; note = 2'-O-methyluridine-3'-phosphorothioate
  modified_base 23: mod_base = OTHER; note = 2'-O-methylcytidine
tagaaaggcagaatataagagtc

SEQ ID NO: 784 - RNA, 23 nt, synthetic construct
  source 1..23: mol_type = other RNA
  modified_base 1: mod_base = OTHER; note = 2'-O-methyluridine-3'-phosphorothioate 5'-(E)-Vinylphosphonate
  modified_base 2: mod_base = OTHER; note = 2'-deoxy-2'-fluoroadenosine-3'-phosphorothioate
  modified_base 3: mod_base = OTHER; note = 2'-O-methyluridine-3'-phosphate
  modified_base 4: mod_base = OTHER; note = 2'-O-methylguanosine-3'-phosphate
  modified_base 5: mod_base = OTHER; note = 2'-O-methylcytidine-3'-phosphate
  modified_base 6: mod_base = OTHER; note = 2'-deoxy-2'-fluorocytidine-3'-phosphate
  modified_base 7: mod_base = OTHER; note = 2'-O-methylcytidine-3'-phosphate
  modified_base 8: mod_base = OTHER; note = 2'-deoxy-2'-fluorouridine-3'-phosphate
  modified_base 9: mod_base = OTHER; note = 2'-deoxy-2'-fluorocytidine-3'-phosphate
  modified_base 10: mod_base = OTHER; note = 2'-O-methyluridine-3'-phosphate
  modified_base 11: mod_base = OTHER; note = 2'-O-methyluridine-3'-phosphate
  modified_base 12: mod_base = OTHER; note = 2'-O-methylcytidine-3'-phosphate
  modified_base 13: mod_base = OTHER; note = 2'-O-methylcytidine-3'-phosphate
  modified_base 14: mod_base = OTHER; note = 2'-deoxy-2'-fluoroadenosine-3'-phosphate
  modified_base 15: mod_base = OTHER; note = 2'-O-methylguanosine-3'-phosphate
  modified_base 16: mod_base = OTHER; note = 2'-deoxy-2'-fluorouridine-3'-phosphate
  modified_base 17: mod_base = OTHER; note = 2'-O-methylcytidine-3'-phosphate
  modified_base 18: mod_base = OTHER; note = 2'-O-methylcytidine-3'-phosphate
  modified_base 19: mod_base = OTHER; note = 2'-O-methyladenosine-3'-phosphate
  modified_base 20: mod_base = OTHER; note = 2'-O-methylguanosine-3'-phosphate
  modified_base 21: mod_base = OTHER; note = 2'-O-methyladenosine-3'-phosphorothioate
  modified_base 22: mod_base = OTHER; note = 2'-O-methyladenosine-3'-phosphorothioate
  modified_base 23: mod_base = OTHER; note = 2'-O-methylcytidine
tatgccctcttccagtccagaac

SEQ ID NO: 785 - RNA, 23 nt, synthetic construct
  source 1..23: mol_type = other RNA
  modified_base 1: mod_base = OTHER; note = 2'-O-methyluridine-3'-phosphorothioate 5'-(E)-Vinylphosphonate
  modified_base 2: mod_base = OTHER; note = 2'-deoxy-2'-fluorouridine-3'-phosphorothioate
  modified_base 3: mod_base = OTHER; note = 2'-O-methylguanosine-3'-phosphate
  modified_base 4: mod_base = OTHER; note = 2'-O-methylcytidine-3'-phosphate
  modified_base 5: mod_base = OTHER; note = 2'-O-methyluridine-3'-phosphate
  modified_base 6: mod_base = OTHER; note = 2'-deoxy-2'-fluoroguanosine-3'-phosphate
  modified_base 7: mod_base = OTHER; note = 2'-O-methyluridine-3'-phosphate
  modified_base 8: mod_base = OTHER; note = 2'-deoxy-2'-fluoroadenosine-3'-phosphate
  modified_base 9: mod_base = OTHER; note = 2'-deoxy-2'-fluorocytidine-3'-phosphate
  modified_base 10: mod_base = OTHER; note = 2'-O-methyladenosine-3'-phosphate
  modified_base 11: mod_base = OTHER; note = 2'-O-methylcytidine-3'-phosphate
  modified_base 12: mod_base = OTHER; note = 2'-O-methyladenosine-3'-phosphate
  modified_base 13: mod_base = OTHER; note = 2'-O-methyluridine-3'-phosphate
  modified_base 14: mod_base = OTHER; note = 2'-deoxy-2'-fluorocytidine-3'-phosphate
  modified_base 15: mod_base = OTHER; note = 2'-O-methyluridine-3'-phosphate
  modified_base 16: mod_base = OTHER; note = 2'-deoxy-2'-fluoroguanosine-3'-phosphate
  modified_base 17: mod_base = OTHER; note = 2'-O-methyladenosine-3'-phosphate
  modified_base 18: mod_base = OTHER; note = 2'-O-methylcytidine-3'-phosphate
  modified_base 19: mod_base = OTHER; note = 2'-O-methyladenosine-3'-phosphate
  modified_base 20: mod_base = OTHER; note = 2'-O-methyluridine-3'-phosphate
  modified_base 21: mod_base = OTHER; note = 2'-O-methylcytidine-3'-phosphorothioate
  modified_base 22: mod_base = OTHER; note = 2'-O-methyluridine-3'-phosphorothioate
  modified_base 23: mod_base = OTHER; note = 2'-O-methyluridine
ttgctgtacacatctgacatctt

SEQ ID NO: 786 - RNA, 23 nt, synthetic construct
  source 1..23: mol_type = other RNA
  modified_base 1: mod_base = OTHER; note = 2'-O-methyluridine-3'-phosphorothioate 5'-(E)-Vinylphosphonate
  modified_base 2: mod_base = OTHER; note = 2'-deoxy-2'-fluorouridine-3'-phosphorothioate
  modified_base 3: mod_base = OTHER; note = 2'-O-methylcytidine-3'-phosphate
  modified_base 4: mod_base = OTHER; note = 2'-O-methyladenosine-3'-phosphate
  modified_base 5: mod_base = OTHER; note = 2'-O-methyluridine-3'-phosphate
  modified_base 6: mod_base = OTHER; note = 2'-deoxy-2'-fluorouridine-3'-phosphate
  modified_base 7: mod_base = OTHER; note = 2'-O-methylguanosine-3'-phosphate
  modified_base 8: mod_base = OTHER; note = 2'-deoxy-2'-fluoroadenosine-3'-phosphate
  modified_base 9: mod_base = OTHER; note = 2'-deoxy-2'-fluorouridine-3'-phosphate
  modified_base 10: mod_base = OTHER; note = 2'-O-methylguanosine-3'-phosphate
  modified_base 11: mod_base = OTHER; note = 2'-O-methyladenosine-3'-phosphate
  modified_base 12: mod_base = OTHER; note = 2'-O-methyluridine-3'-phosphate
  modified_base 13: mod_base = OTHER; note = 2'-O-methylcytidine-3'-phosphate
  modified_base 14: mod_base = OTHER; note = 2'-deoxy-2'-fluorouridine-3'-phosphate
  modified_base 15: mod_base = OTHER; note = 2'-O-methylguanosine-3'-phosphate
  modified_base 16: mod_base = OTHER; note = 2'-deoxy-2'-fluorouridine-3'-phosphate
  modified_base 17: mod_base = OTHER; note = 2'-O-methyladenosine-3'-phosphate
  modified_base 18: mod_base = OTHER; note = 2'-O-methylguanosine-3'-phosphate
  modified_base 19: mod_base = OTHER; note = 2'-O-methylguanosine-3'-phosphate
  modified_base 20: mod_base = OTHER; note = 2'-O-methylguanosine-3'-phosphate
  modified_base 21: mod_base = OTHER; note = 2'-O-methyluridine-3'-phosphorothioate
  modified_base 22: mod_base = OTHER; note = 2'-O-methylguanosine-3'-phosphorothioate
  modified_base 23: mod_base = OTHER; note = 2'-O-methylguanosine
ttcattgatgatctgtagggtgg

SEQ ID NO: 787 - RNA, 23 nt, synthetic construct
  source 1..23: mol_type = other RNA
  modified_base 1: mod_base = OTHER; note = 2'-O-methyluridine-3'-phosphorothioate 5'-(E)-Vinylphosphonate
  modified_base 2: mod_base = OTHER; note = 2'-deoxy-2'-fluoroguanosine-3'-phosphorothioate
  modified_base 3: mod_base = OTHER; note = 2'-O-methyladenosine-3'-phosphate
  modified_base 4: mod_base = OTHER; note = 2'-O-methyluridine-3'-phosphate
  modified_base 5: mod_base = OTHER; note = 2'-O-methylcytidine-3'-phosphate
  modified_base 6: mod_base = OTHER; note = 2'-deoxy-2'-fluorocytidine-3'-phosphate
  modified_base 7: mod_base = OTHER; note = 2'-O-methyluridine-3'-phosphate
  modified_base 8: mod_base = OTHER; note = 2'-deoxy-2'-fluoroguanosine-3'-phosphate
  modified_base 9: mod_base = OTHER; note = 2'-deoxy-2'-fluorouridine-3'-phosphate
  modified_base 10: mod_base = OTHER; note = 2'-O-methylcytidine-3'-phosphate
  modified_base 11: mod_base = OTHER; note = 2'-O-methyladenosine-3'-phosphate
  modified_base 12: mod_base = OTHER; note = 2'-O-methyluridine-3'-phosphate
  modified_base 13: mod_base = OTHER; note = 2'-O-methyluridine-3'-phosphate
  modified_base 14: mod_base = OTHER; note = 2'-deoxy-2'-fluoroguanosine-3'-phosphate
  modified_base 15: mod_base = OTHER; note = 2'-O-methyladenosine-3'-phosphate
  modified_base 16: mod_base = OTHER; note = 2'-deoxy-2'-fluorouridine-3'-phosphate
  modified_base 17: mod_base = OTHER; note = 2'-O-methylguanosine-3'-phosphate
  modified_base 18: mod_base = OTHER; note = 2'-O-methyladenosine-3'-phosphate
  modified_base 19: mod_base = OTHER; note = 2'-O-methyluridine-3'-phosphate
  modified_base 20: mod_base = OTHER; note = 2'-O-methylcytidine-3'-phosphate
  modified_base 21: mod_base = OTHER; note = 2'-O-methyluridine-3'-phosphorothioate
  modified_base 22: mod_base = OTHER; note = 2'-O-methylguanosine-3'-phosphorothioate
  modified_base 23: mod_base = OTHER; note = 2'-O-methyluridine
tgatcctgtcattgatgatctgt

SEQ ID NO: 788 - RNA, 23 nt, synthetic construct
  source 1..23: mol_type = other RNA
  modified_base 1: mod_base = OTHER; note = 2'-O-methyluridine-3'-phosphorothioate 5'-(E)-Vinylphosphonate
  modified_base 2: mod_base = OTHER; note = 2'-deoxy-2'-fluorouridine-3'-phosphorothioate
  modified_base 3: mod_base = OTHER; note = 2'-O-methylguanosine-3'-phosphate
  modified_base 4: mod_base = OTHER; note = 2'-O-methylguanosine-3'-phosphate
  modified_base 5: mod_base = OTHER; note = 2'-O-methyladenosine-3'-phosphate
  modified_base 6: mod_base = OTHER; note = 2'-deoxy-2'-fluorouridine-3'-phosphate
  modified_base 7: mod_base = OTHER; note = 2'-O-methyladenosine-3'-phosphate
  modified_base 8: mod_base = OTHER; note = 2'-deoxy-2'-fluoroguanosine-3'-phosphate
  modified_base 9: mod_base = OTHER; note = 2'-deoxy-2'-fluoroadenosine-3'-phosphate
  modified_base 10: mod_base = OTHER; note = 2'-O-methyluridine-3'-phosphate
  modified_base 11: mod_base = OTHER; note = 2'-O-methylcytidine-3'-phosphate
  modified_base 12: mod_base = OTHER; note = 2'-O-methylcytidine-3'-phosphate
  modified_base 13: mod_base = OTHER; note = 2'-O-methyluridine-3'-phosphate
  modified_base 14: mod_base = OTHER; note = 2'-deoxy-2'-fluoroguanosine-3'-phosphate
  modified_base 15: mod_base = OTHER; note = 2'-O-methyluridine-3'-phosphate
  modified_base 16: mod_base = OTHER; note = 2'-deoxy-2'-fluorocytidine-3'-phosphate
  modified_base 17: mod_base = OTHER; note = 2'-O-methyladenosine-3'-phosphate
  modified_base 18: mod_base = OTHER; note = 2'-O-methyluridine-3'-phosphate
  modified_base 19: mod_base = OTHER; note = 2'-O-methyluridine-3'-phosphate
  modified_base 20: mod_base = OTHER; note = 2'-O-methylguanosine-3'-phosphate
  modified_base 21: mod_base = OTHER; note = 2'-O-methyladenosine-3'-phosphorothioate
  modified_base 22: mod_base = OTHER; note = 2'-O-methyluridine-3'-phosphorothioate
  modified_base 23: mod_base = OTHER; note = 2'-O-methylguanosine
ttggatagatcctgtcattgatg

SEQ ID NO: 789 - RNA, 23 nt, synthetic construct
  source 1..23: mol_type = other RNA
  modified_base 1: mod_base = OTHER; note = 2'-O-methyluridine-3'-phosphorothioate 5'-(E)-Vinylphosphonate
  modified_base 2: mod_base = OTHER; note = 2'-deoxy-2'-fluoroadenosine-3'-phosphorothioate
  modified_base 3: mod_base = OTHER; note = 2'-O-methyluridine-3'-phosphate
  modified_base 4: mod_base = OTHER; note = 2'-O-methylguanosine-3'-phosphate
  modified_base 5: mod_base = OTHER; note = 2'-O-methylguanosine-3'-phosphate
  modified_base 6: mod_base = OTHER; note = 2'-deoxy-2'-fluoroadenosine-3'-phosphate
  modified_base 7: mod_base = OTHER; note = 2'-O-methyluridine-3'-phosphate
  modified_base 8: mod_base = OTHER; note = 2'-deoxy-2'-fluoroadenosine-3'-phosphate
  modified_base 9: mod_base = OTHER; note = 2'-deoxy-2'-fluoroguanosine-3'-phosphate
  modified_base 10: mod_base = OTHER; note = 2'-O-methyladenosine-3'-phosphate
  modified_base 11: mod_base = OTHER; note = 2'-O-methyluridine-3'-phosphate
  modified_base 12: mod_base = OTHER; note = 2'-O-methylcytidine-3'-phosphate
  modified_base 13: mod_base = OTHER; note = 2'-O-methylcytidine-3'-phosphate
  modified_base 14: mod_base = OTHER; note = 2'-deoxy-2'-fluorouridine-3'-phosphate
  modified_base 15: mod_base = OTHER; note = 2'-O-methylguanosine-3'-phosphate
  modified_base 16: mod_base = OTHER; note = 2'-deoxy-2'-fluorouridine-3'-phosphate
  modified_base 17: mod_base = OTHER; note = 2'-O-methylcytidine-3'-phosphate
  modified_base 18: mod_base = OTHER; note = 2'-O-methyladenosine-3'-phosphate
  modified_base 19: mod_base = OTHER; note = 2'-O-methyluridine-3'-phosphate
  modified_base 20: mod_base = OTHER; note = 2'-O-methyluridine-3'-phosphate
  modified_base 21: mod_base = OTHER; note = 2'-O-methylguanosine-3'-phosphorothioate
  modified_base 22: mod_base = OTHER; note = 2'-O-methyladenosine-3'-phosphorothioate
  modified_base 23: mod_base = OTHER; note = 2'-O-methyluridine
tatggatagatcctgtcattgat

SEQ ID NO: 790 - RNA, 23 nt, synthetic construct
  source 1..23: mol_type = other RNA
  modified_base 1: mod_base = OTHER; note = 2'-O-methyluridine-3'-phosphorothioate 5'-(E)-Vinylphosphonate
  modified_base 2: mod_base = OTHER; note = 2'-deoxy-2'-fluorouridine-3'-phosphorothioate
  modified_base 3: mod_base = OTHER; note = 2'-O-methyladenosine-3'-phosphate
  modified_base 4: mod_base = OTHER; note = 2'-O-methyluridine-3'-phosphate
  modified_base 5: mod_base = OTHER; note = 2'-O-methylguanosine-3'-phosphate
  modified_base 6: mod_base = OTHER; note = 2'-deoxy-2'-fluoroguanosine-3'-phosphate
  modified_base 7: mod_base = OTHER; note = 2'-O-methyladenosine-3'-phosphate
  modified_base 8: mod_base = OTHER; note = 2'-deoxy-2'-fluorouridine-3'-phosphate
  modified_base 9: mod_base = OTHER; note = 2'-deoxy-2'-fluoroadenosine-3'-phosphate
  modified_base 10: mod_base = OTHER; note = 2'-O-methylguanosine-3'-phosphate
  modified_base 11: mod_base = OTHER; note = 2'-O-methyladenosine-3'-phosphate
  modified_base 12: mod_base = OTHER; note = 2'-O-methyluridine-3'-phosphate
  modified_base 13: mod_base = OTHER; note = 2'-O-methylcytidine-3'-phosphate
  modified_base 14: mod_base = OTHER; note = 2'-deoxy-2'-fluorocytidine-3'-phosphate
  modified_base 15: mod_base = OTHER; note = 2'-O-methyluridine-3'-phosphate
  modified_base 16: mod_base = OTHER; note = 2'-deoxy-2'-fluoroguanosine-3'-phosphate
  modified_base 17: mod_base = OTHER; note = 2'-O-methyluridine-3'-phosphate
  modified_base 18: mod_base = OTHER; note = 2'-O-methylcytidine-3'-phosphate
  modified_base 19: mod_base = OTHER; note = 2'-O-methyladenosine-3'-phosphate
  modified_base 20: mod_base = OTHER; note = 2'-O-methyluridine-3'-phosphate
  modified_base 21: mod_base = OTHER; note = 2'-O-methyluridine-3'-phosphorothioate
  modified_base 22: mod_base = OTHER; note = 2'-O-methylguanosine-3'-phosphorothioate
  modified_base 23: mod_base = OTHER; note = 2'-O-methyladenosine
ttatggatagatcctgtcattga

SEQ ID NO: 791 - RNA, 23 nt, synthetic construct
  source 1..23: mol_type = other RNA
  modified_base 1: mod_base = OTHER; note = 2'-O-methyluridine-3'-phosphorothioate 5'-(E)-Vinylphosphonate
  modified_base 2: mod_base = OTHER; note = 2'-deoxy-2'-fluoroadenosine-3'-phosphorothioate
  modified_base 3: mod_base = OTHER; note = 2'-O-methyluridine-3'-phosphate
  modified_base 4: mod_base = OTHER; note = 2'-O-methyladenosine-3'-phosphate
  modified_base 5: mod_base = OTHER; note = 2'-O-methyluridine-3'-phosphate
  modified_base 6: mod_base = OTHER; note = 2'-deoxy-2'-fluoroguanosine-3'-phosphate
  modified_base 7: mod_base = OTHER; note = 2'-O-methylguanosine-3'-phosphate
  modified_base 8: mod_base = OTHER; note = 2'-deoxy-2'-fluoroadenosine-3'-phosphate
  modified_base 9: mod_base = OTHER; note = 2'-deoxy-2'-fluorouridine-3'-phosphate
  modified_base 10: mod_base = OTHER; note = 2'-O-methyladenosine-3'-phosphate
  modified_base 11: mod_base = OTHER; note = 2'-O-methylguanosine-3'-phosphate
  modified_base 12: mod_base = OTHER; note = 2'-O-methyladenosine-3'-phosphate
  modified_base 13: mod_base = OTHER; note = 2'-O-methyluridine-3'-phosphate
  modified_base 14: mod_base = OTHER; note = 2'-deoxy-2'-fluorocytidine-3'-phosphate
  modified_base 15: mod_base = OTHER; note = 2'-O-methylcytidine-3'-phosphate
  modified_base 16: mod_base = OTHER; note = 2'-deoxy-2'-fluorouridine-3'-phosphate
  modified_base 17: mod_base = OTHER; note = 2'-O-methylguanosine-3'-phosphate
  modified_base 18: mod_base = OTHER; note = 2'-O-methyluridine-3'-phosphate
  modified_base 19: mod_base = OTHER; note = 2'-O-methylcytidine-3'-phosphate
  modified_base 20: mod_base = OTHER; note = 2'-O-methyladenosine-3'-phosphate
  modified_base 21: mod_base = OTHER; note = 2'-O-methyluridine-3'-phosphorothioate
  modified_base 22: mod_base = OTHER; note = 2'-O-methyluridine-3'-phosphorothioate
  modified_base 23: mod_base = OTHER; note = 2'-O-methylguanosine
tatatggatagatcctgtcattg

SEQ ID NO: 792 - RNA, 23 nt, synthetic construct
  source 1..23: mol_type = other RNA
  modified_base 1: mod_base = OTHER; note = 2'-O-methyluridine-3'-phosphorothioate 5'-(E)-Vinylphosphonate
  modified_base 2: mod_base = OTHER; note = 2'-deoxy-2'-fluoroguanosine-3'-phosphorothioate
  modified_base 3: mod_base = OTHER; note = 2'-O-methylcytidine-3'-phosphate
  modified_base 4: mod_base = OTHER; note = 2'-O-methyladenosine-3'-phosphate
  modified_base 5: mod_base = OTHER; note = 2'-O-methyluridine-3'-phosphate
  modified_base 6: mod_base = OTHER; note = 2'-deoxy-2'-fluoroadenosine-3'-phosphate
  modified_base 7: mod_base = OTHER; note = 2'-O-methyluridine-3'-phosphate
  modified_base 8: mod_base = OTHER; note = 2'-deoxy-2'-fluoroguanosine-3'-phosphate
  modified_base 9: mod_base = OTHER; note = 2'-deoxy-2'-fluoroguanosine-3'-phosphate
  modified_base 10: mod_base = OTHER; note = 2'-O-methyladenosine-3'-phosphate
  modified_base 11: mod_base = OTHER; note = 2'-O-methyluridine-3'-phosphate
  modified_base 12: mod_base = OTHER; note = 2'-O-methyladenosine-3'-phosphate
  modified_base 13: mod_base = OTHER; note = 2'-O-methylguanosine-3'-phosphate
  modified_base 14: mod_base = OTHER; note = 2'-deoxy-2'-fluoroadenosine-3'-phosphate
  modified_base 15: mod_base = OTHER; note = 2'-O-methyluridine-3'-phosphate
  modified_base 16: mod_base = OTHER; note = 2'-deoxy-2'-fluorocytidine-3'-phosphate
  modified_base 17: mod_base = OTHER; note = 2'-O-methylcytidine-3'-phosphate
  modified_base 18: mod_base = OTHER; note = 2'-O-methyluridine-3'-phosphate
  modified_base 19: mod_base = OTHER; note = 2'-O-methylguanosine-3'-phosphate
  modified_base 20: mod_base = OTHER; note = 2'-O-methyluridine-3'-phosphate
  modified_base 21: mod_base = OTHER; note = 2'-O-methylcytidine-3'-phosphorothioate
  modified_base 22: mod_base = OTHER; note = 2'-O-methyladenosine-3'-phosphorothioate
  modified_base 23: mod_base = OTHER; note = 2'-O-methyluridine
tgcatatggatagatcctgtcat

SEQ ID NO: 793 - RNA, 23 nt, synthetic construct
  source 1..23: mol_type = other RNA
  modified_base 1: mod_base = OTHER; note = 2'-O-methyluridine-3'-phosphorothioate 5'-(E)-Vinylphosphonate
  modified_base 2: mod_base = OTHER; note = 2'-deoxy-2'-fluorouridine-3'-phosphorothioate
  modified_base 3: mod_base = OTHER; note = 2'-O-methylguanosine-3'-phosphate
  modified_base 4: mod_base = OTHER; note = 2'-O-methylcytidine-3'-phosphate
  modified_base 5: mod_base = OTHER; note = 2'-O-methyladenosine-3'-phosphate
  modified_base 6: mod_base = OTHER; note = 2'-deoxy-2'-fluorouridine-3'-phosphate
  modified_base 7: mod_base = OTHER; note = 2'-O-methyladenosine-3'-phosphate
  modified_base 8: mod_base = OTHER; note = 2'-deoxy-2'-fluorouridine-3'-phosphate
  modified_base 9: mod_base = OTHER; note = 2'-deoxy-2'-fluoroguanosine-3'-phosphate
  modified_base 10: mod_base = OTHER; note = 2'-O-methylguanosine-3'-phosphate
  modified_base 11: mod_base = OTHER; note = 2'-O-methyladenosine-3'-phosphate
  modified_base 12: mod_base = OTHER; note = 2'-O-methyluridine-3'-phosphate
  modified_base 13: mod_base = OTHER; note = 2'-O-methyladenosine-3'-phosphate
  modified_base 14: mod_base = OTHER; note = 2'-deoxy-2'-fluoroguanosine-3'-phosphate
  modified_base 15: mod_base = OTHER; note = 2'-O-methyladenosine-3'-phosphate
  modified_base 16: mod_base = OTHER; note = 2'-deoxy-2'-fluorouridine-3'-phosphate
  modified_base 17: mod_base = OTHER; note = 2'-O-methylcytidine-3'-phosphate
  modified_base 18: mod_base = OTHER; note = 2'-O-methylcytidine-3'-phosphate
  modified_base 19: mod_base = OTHER; note = 2'-O-methyluridine-3'-phosphate
  modified_base 20: mod_base = OTHER; note = 2'-O-methylguanosine-3'-phosphate
  modified_base 21: mod_base = OTHER; note = 2'-O-methyluridine-3'-phosphorothioate
  modified_base 22: mod_base = OTHER; note = 2'-O-methylcytidine-3'-phosphorothioate
  modified_base 23: mod_base = OTHER; note = 2'-O-methyladenosine
ttgcatatggatagatcctgtca

SEQ ID NO: 794 - RNA, 23 nt, synthetic construct
  source 1..23: mol_type = other RNA
  modified_base 1: mod_base = OTHER; note = 2'-O-methyluridine-3'-phosphorothioate 5'-(E)-Vinylphosphonate
  modified_base 2: mod_base = OTHER; note = 2'-deoxy-2'-fluoroadenosine-3'-phosphorothioate
  modified_base 3: mod_base = OTHER; note = 2'-O-methyluridine-3'-phosphate
  modified_base 4: mod_base = OTHER; note = 2'-O-methyluridine-3'-phosphate
  modified_base 5: mod_base = OTHER; note = 2'-O-methylcytidine-3'-phosphate
  modified_base 6: mod_base = OTHER; note = 2'-deoxy-2'-fluorocytidine-3'-phosphate
  modified_base 7: mod_base = OTHER; note = 2'-O-methyladenosine-3'-phosphate
  modified_base 8: mod_base = OTHER; note = 2'-deoxy-2'-fluorocytidine-3'-phosphate
  modified_base 9: mod_base = OTHER; note = 2'-deoxy-2'-fluorouridine-3'-phosphate
  modified_base 10: mod_base = OTHER; note = 2'-O-methylcytidine-3'-phosphate
  modified_base 11: mod_base = OTHER; note = 2'-O-methyluridine-3'-phosphate
  modified_base 12: mod_base = OTHER; note = 2'-O-methyluridine-3'-phosphate
  modified_base 13: mod_base = OTHER; note = 2'-O-methylcytidine-3'-phosphate
  modified_base 14: mod_base = OTHER; note = 2'-deoxy-2'-fluoroadenosine-3'-phosphate
  modified_base 15: mod_base = OTHER; note = 2'-O-methyluridine-3'-phosphate
  modified_base 16: mod_base = OTHER; note = 2'-deoxy-2'-fluoroadenosine-3'-phosphate
  modified_base 17: mod_base = OTHER; note = 2'-O-methylguanosine-3'-phosphate
  modified_base 18: mod_base = OTHER; note = 2'-O-methylguanosine-3'-phosphate
  modified_base 19: mod_base = OTHER; note = 2'-O-methyladenosine-3'-phosphate
  modified_base 20: mod_base = OTHER; note = 2'-O-methylguanosine-3'-phosphate
  modified_base 21: mod_base = OTHER; note = 2'-O-methyladenosine-3'-phosphorothioate
  modified_base 22: mod_base = OTHER; note = 2'-O-methyluridine-3'-phosphorothioate
  modified_base 23: mod_base = OTHER; note = 2'-O-methylguanosine
tattccactcttcataggagatg

SEQ ID NO: 795 - RNA, 23 nt, synthetic construct
  source 1..23: mol_type = other RNA
  modified_base 1: mod_base = OTHER; note = 2'-O-methyluridine-3'-phosphorothioate 5'-(E)-Vinylphosphonate
  modified_base 2: mod_base = OTHER; note = 2'-deoxy-2'-fluorocytidine-3'-phosphorothioate
  modified_base 3: mod_base = OTHER; note = 2'-O-methyladenosine-3'-phosphate
  modified_base 4: mod_base = OTHER; note = 2'-O-methyluridine-3'-phosphate
  modified_base 5: mod_base = OTHER; note = 2'-O-methyluridine-3'-phosphate
  modified_base 6: mod_base = OTHER; note = 2'-deoxy-2'-fluorocytidine-3'-phosphate
  modified_base 7: mod_base = OTHER; note = 2'-O-methylcytidine-3'-phosphate
  modified_base 8: mod_base = OTHER; note = 2'-deoxy-2'-fluoroadenosine-3'-phosphate
  modified_base 9: mod_base = OTHER; note = 2'-deoxy-2'-fluorocytidine-3'-phosphate
  modified_base 10: mod_base = OTHER; note = 2'-O-methyluridine-3'-phosphate
  modified_base 11: mod_base = OTHER; note = 2'-O-methylcytidine-3'-phosphate
  modified_base 12: mod_base = OTHER; note = 2'-O-methyluridine-3'-phosphate
  modified_base 13: mod_base = OTHER; note = 2'-O-methyluridine-3'-phosphate
  modified_base 14: mod_base = OTHER; note = 2'-deoxy-2'-fluorocytidine-3'-phosphate
  modified_base 15: mod_base = OTHER; note = 2'-O-methyladenosine-3'-phosphate
  modified_base 16: mod_base = OTHER; note = 2'-deoxy-2'-fluorouridine-3'-phosphate
  modified_base 17: mod_base = OTHER; note = 2'-O-methyladenosine-3'-phosphate
  modified_base 18: mod_base = OTHER; note = 2'-O-methylguanosine-3'-phosphate
  modified_base 19: mod_base = OTHER; note = 2'-O-methylguanosine-3'-phosphate
  modified_base 20: mod_base = OTHER; note = 2'-O-methyladenosine-3'-phosphate
  modified_base 21: mod_base = OTHER; note = 2'-O-methylguanosine-3'-phosphorothioate
  modified_base 22: mod_base = OTHER; note = 2'-O-methyladenosine-3'-phosphorothioate
  modified_base 23: mod_base = OTHER; note = 2'-O-methyluridine
tcattccactcttcataggagat

SEQ ID NO: 796 - RNA, 23 nt, synthetic construct
  source 1..23: mol_type = other RNA
  modified_base 1: mod_base = OTHER; note = 2'-O-methyluridine-3'-phosphorothioate 5'-(E)-Vinylphosphonate
  modified_base 2: mod_base = OTHER; note = 2'-deoxy-2'-fluoroguanosine-3'-phosphorothioate
  modified_base 3: mod_base = OTHER; note = 2'-O-methyluridine-3'-phosphate
  modified_base 4: mod_base = OTHER; note = 2'-O-methylcytidine-3'-phosphate
  modified_base 5: mod_base = OTHER; note = 2'-O-methyladenosine-3'-phosphate
  modified_base 6: mod_base = OTHER; note = 2'-deoxy-2'-fluorouridine-3'-phosphate
  modified_base 7: mod_base = OTHER; note = 2'-O-methyluridine-3'-phosphate
  modified_base 8: mod_base = OTHER; note = 2'-deoxy-2'-fluorocytidine-3'-phosphate
  modified_base 9: mod_base = OTHER; note = 2'-deoxy-2'-fluorocytidine-3'-phosphate
  modified_base 10: mod_base = OTHER; note = 2'-O-methyladenosine-3'-phosphate
  modified_base 11: mod_base = OTHER; note = 2'-O-methylcytidine-3'-phosphate
  modified_base 12: mod_base = OTHER; note = 2'-O-methyluridine-3'-phosphate
  modified_base 13: mod_base = OTHER; note = 2'-O-methylcytidine-3'-phosphate
  modified_base 14: mod_base = OTHER; note = 2'-deoxy-2'-fluorouridine-3'-phosphate
  modified_base 15: mod_base = OTHER; note = 2'-O-methyluridine-3'-phosphate
  modified_base 16: mod_base = OTHER; note = 2'-deoxy-2'-fluorocytidine-3'-phosphate
  modified_base 17: mod_base = OTHER; note = 2'-O-methyladenosine-3'-phosphate
  modified_base 18: mod_base = OTHER; note = 2'-O-methyluridine-3'-phosphate
  modified_base 19: mod_base = OTHER; note = 2'-O-methyladenosine-3'-phosphate
  modified_base 20: mod_base = OTHER; note = 2'-O-methylguanosine-3'-phosphate
  modified_base 21: mod_base = OTHER; note = 2'-O-methylguanosine-3'-phosphorothioate
  modified_base 22: mod_base = OTHER; note = 2'-O-methyladenosine-3'-phosphorothioate
  modified_base 23: mod_base = OTHER; note = 2'-O-methylguanosine
tgtcattccactcttcataggag

SEQ ID NO: 797 - RNA, 23 nt, synthetic construct
  source 1..23: mol_type = other RNA
  modified_base 1: mod_base = OTHER; note = 2'-O-methyluridine-3'-phosphorothioate 5'-(E)-Vinylphosphonate
  modified_base 2: mod_base = OTHER; note = 2'-deoxy-2'-fluorocytidine-3'-phosphorothioate
  modified_base 3: mod_base = OTHER; note = 2'-O-methyladenosine-3'-phosphate
  modified_base 4: mod_base = OTHER; note = 2'-O-methylguanosine-3'-phosphate
  modified_base 5: mod_base = OTHER; note = 2'-O-methylguanosine-3'-phosphate
  modified_base 6: mod_base = OTHER; note = 2'-deoxy-2'-fluoroadenosine-3'-phosphate
  modified_base 7: mod_base = OTHER; note = 2'-O-methylguanosine-3'-phosphate
  modified_base 8: mod_base = OTHER; note = 2'-deoxy-2'-fluoroguanosine-3'-phosphate
  modified_base 9: mod_base = OTHER; note = 2'-deoxy-2'-fluoroguanosine-3'-phosphate
  modified_base 10: mod_base = OTHER; note = 2'-O-methyluridine-3'-phosphate
  modified_base 11: mod_base = OTHER; note = 2'-O-methylcytidine-3'-phosphate
  modified_base 12: mod_base = OTHER; note = 2'-O-methyladenosine-3'-phosphate
  modified_base 13: mod_base = OTHER; note = 2'-O-methyluridine-3'-phosphate
  modified_base 14: mod_base = OTHER; note = 2'-deoxy-2'-fluorouridine-3'-phosphate
  modified_base 15: mod_base = OTHER; note = 2'-O-methylcytidine-3'-phosphate
  modified_base 16: mod_base = OTHER; note = 2'-deoxy-2'-fluorocytidine-3'-phosphate
  modified_base 17: mod_base = OTHER; note = 2'-O-methyladenosine-3'-phosphate
  modified_base 18: mod_base = OTHER; note = 2'-O-methylcytidine-3'-phosphate
  modified_base 19: mod_base = OTHER; note = 2'-O-methyluridine-3'-phosphate
  modified_base 20: mod_base = OTHER; note = 2'-O-methylcytidine-3'-phosphate
  modified_base 21: mod_base = OTHER; note = 2'-O-methyluridine-3'-phosphorothioate
  modified_base 22: mod_base = OTHER; note = 2'-O-methyluridine-3'-phosphorothioate
  modified_base 23: mod_base = OTHER; note = 2'-O-methylcytidine
tcaggagggtcattccactcttc

SEQ ID NO: 798 - RNA, 23 nt, synthetic construct
  source 1..23: mol_type = other RNA
  modified_base 1: mod_base = OTHER; note = 2'-O-methyluridine-3'-phosphorothioate 5'-(E)-Vinylphosphonate
  modified_base 2: mod_base = OTHER; note = 2'-deoxy-2'-fluoroguanosine-3'-phosphorothioate
  modified_base 3: mod_base = OTHER; note = 2'-O-methylcytidine-3'-phosphate
  modified_base 4: mod_base = OTHER; note = 2'-O-methyladenosine-3'-phosphate
  modified_base 5: mod_base = OTHER; note = 2'-O-methylguanosine-3'-phosphate
  modified_base 6: mod_base = OTHER; note = 2'-deoxy-2'-fluoroguanosine-3'-phosphate
  modified_base 7: mod_base = OTHER; note = 2'-O-methyladenosine-3'-phosphate
  modified_base 8: mod_base = OTHER; note = 2'-deoxy-2'-fluoroguanosine-3'-phosphate
  modified_base 9: mod_base = OTHER; note = 2'-deoxy-2'-fluoroguanosine-3'-phosphate
  modified_base 10: mod_base = OTHER; note = 2'-O-methylguanosine-3'-phosphate
  modified_base 11: mod_base = OTHER; note = 2'-O-methyluridine-3'-phosphate
  modified_base 12: mod_base = OTHER; note = 2'-O-methylcytidine-3'-phosphate
  modified_base 13: mod_base = OTHER; note = 2'-O-methyladenosine-3'-phosphate
  modified_base 14: mod_base = OTHER; note = 2'-deoxy-2'-fluorouridine-3'-phosphate
  modified_base 15: mod_base = OTHER; note = 2'-O-methyluridine-3'-phosphate
  modified_base 16: mod_base = OTHER; note = 2'-deoxy-2'-fluorocytidine-3'-phosphate
  modified_base 17: mod_base = OTHER; note = 2'-O-methylcytidine-3'-phosphate
  modified_base 18: mod_base = OTHER; note = 2'-O-methyladenosine-3'-phosphate
  modified_base 19: mod_base = OTHER; note = 2'-O-methylcytidine-3'-phosphate
  modified_base 20: mod_base = OTHER; note = 2'-O-methyluridine-3'-phosphate
  modified_base 21: mod_base = OTHER; note = 2'-O-methylcytidine-3'-phosphorothioate
  modified_base 22: mod_base = OTHER; note = 2'-O-methyluridine-3'-phosphorothioate
  modified_base 23: mod_base = OTHER; note = 2'-O-methyluridine
tgcaggagggtcattccactctt

SEQ ID NO: 799 - RNA, 23 nt, synthetic construct
  source 1..23: mol_type = other RNA
  modified_base 1: mod_base = OTHER; note = 2'-O-methyluridine-3'-phosphorothioate 5'-(E)-Vinylphosphonate
  modified_base 2: mod_base = OTHER; note = 2'-deoxy-2'-fluorocytidine-3'-phosphorothioate
  modified_base 3: mod_base = OTHER; note = 2'-O-methyladenosine-3'-phosphate
  modified_base 4: mod_base = OTHER; note = 2'-O-methylcytidine-3'-phosphate
  modified_base 5: mod_base = OTHER; note = 2'-O-methyluridine-3'-phosphate
  modified_base 6: mod_base = OTHER; note = 2'-deoxy-2'-fluorouridine-3'-phosphate
  modified_base 7: mod_base = OTHER; note = 2'-O-methylcytidine-3'-phosphate
  modified_base 8: mod_base = OTHER; note = 2'-deoxy-2'-fluoroadenosine-3'-phosphate
  modified_base 9: mod_base = OTHER; note = 2'-deoxy-2'-fluorocytidine-3'-phosphate
  modified_base 10: mod_base = OTHER; note = 2'-O-methyladenosine-3'-phosphate
  modified_base 11: mod_base = OTHER; note = 2'-O-methylguanosine-3'-phosphate
  modified_base 12: mod_base = OTHER; note = 2'-O-methylcytidine-3'-phosphate
  modified_base 13: mod_base = OTHER; note = 2'-O-methyladenosine-3'-phosphate
  modified_base 14: mod_base = OTHER; note = 2'-deoxy-2'-fluoroguanosine-3'-phosphate
  modified_base 15: mod_base = OTHER; note = 2'-O-methylguanosine-3'-phosphate
  modified_base 16: mod_base = OTHER; note = 2'-deoxy-2'-fluoroadenosine-3'-phosphate
  modified_base 17: mod_base = OTHER; note = 2'-O-methylguanosine-3'-phosphate
  modified_base 18: mod_base = OTHER; note = 2'-O-methylguanosine-3'-phosphate
  modified_base 19: mod_base = OTHER; note = 2'-O-methylguanosine-3'-phosphate
  modified_base 20: mod_base = OTHER; note = 2'-O-methyluridine-3'-phosphate
  modified_base 21: mod_base = OTHER; note = 2'-O-methylcytidine-3'-phosphorothioate
  modified_base 22: mod_base = OTHER; note = 2'-O-methyladenosine-3'-phosphorothioate
  modified_base 23: mod_base = OTHER; note = 2'-O-methyluridine
tcacttcacagcaggagggtcat

SEQ ID NO: 800 - RNA, 23 nt, synthetic construct
  source 1..23: mol_type = other RNA
  modified_base 1: mod_base = OTHER; note = 2'-O-methyluridine-3'-phosphorothioate 5'-(E)-Vinylphosphonate
  modified_base 2: mod_base = OTHER; note = 2'-deoxy-2'-fluoroadenosine-3'-phosphorothioate
  modified_base 3: mod_base = OTHER; note = 2'-O-methylcytidine-3'-phosphate
  modified_base 4: mod_base = OTHER; note = 2'-O-methyluridine-3'-phosphate
  modified_base 5: mod_base = OTHER; note = 2'-O-methyladenosine-3'-phosphate
  modified_base 6: mod_base = OTHER; note = 2'-deoxy-2'-fluoroguanosine-3'-phosphate
  modified_base 7: mod_base = OTHER; note = 2'-O-methylcytidine-3'-phosphate
  modified_base 8: mod_base = OTHER; note = 2'-deoxy-2'-fluorocytidine-3'-phosphate
  modified_base 9: mod_base = OTHER; note = 2'-deoxy-2'-fluorocytidine-3'-phosphate
  modified_base 10: mod_base = OTHER; note = 2'-O-methyladenosine-3'-phosphate
  modified_base 11: mod_base = OTHER; note = 2'-O-methylcytidine-3'-phosphate
  modified_base 12: mod_base = OTHER; note = 2'-O-methyluridine-3'-phosphate
  modified_base 13: mod_base = OTHER; note = 2'-O-methyluridine-3'-phosphate
  modified_base 14: mod_base = OTHER; note = 2'-deoxy-2'-fluorocytidine-3'-phosphate
  modified_base 15: mod_base = OTHER; note = 2'-O-methyladenosine-3'-phosphate
  modified_base 16: mod_base = OTHER; note = 2'-deoxy-2'-fluorocytidine-3'-phosphate
  modified_base 17: mod_base = OTHER; note = 2'-O-methyladenosine-3'-phosphate
  modified_base 18: mod_base = OTHER; note = 2'-O-methylguanosine-3'-phosphate
  modified_base 19: mod_base = OTHER; note = 2'-O-methylcytidine-3'-phosphate
  modified_base 20: mod_base = OTHER; note = 2'-O-methyladenosine-3'-phosphate
  modified_base 21: mod_base = OTHER; note = 2'-O-methylguanosine-3'-phosphorothioate
  modified_base 22: mod_base = OTHER; note = 2'-O-methylguanosine-3'-phosphorothioate
  modified_base 23: mod_base = OTHER; note = 2'-O-methyladenosine
tactagcccacttcacagcagga

SEQ ID NO: 801 - RNA, 23 nt, synthetic construct
  source 1..23: mol_type = other RNA
  modified_base 1: mod_base = OTHER; note = 2'-O-methyluridine-3'-phosphorothioate 5'-(E)-Vinylphosphonate
  modified_base 2: mod_base = OTHER; note = 2'-deoxy-2'-fluoroguanosine-3'-phosphorothioate
  modified_base 3: mod_base = OTHER; note = 2'-O-methylguanosine-3'-phosphate
  modified_base 4: mod_base = OTHER; note = 2'-O-methyluridine-3'-phosphate
  modified_base 5: mod_base = OTHER; note = 2'-O-methyluridine-3'-phosphate
  modified_base 6: mod_base = OTHER; note = 2'-deoxy-2'-fluoroguanosine-3'-phosphate
  modified_base 7: mod_base = OTHER; note = 2'-O-methylcytidine-3'-phosphate
  modified_base 8: mod_base = OTHER; note = 2'-deoxy-2'-fluorouridine-3'-phosphate
  modified_base 9: mod_base = OTHER; note = 2'-deoxy-2'-fluorocytidine-3'-phosphate
  modified_base 10: mod_base = OTHER; note = 2'-O-methyladenosine-3'-phosphate
  modified_base 11: mod_base = OTHER; note = 2'-O-methylcytidine-3'-phosphate
  modified_base 12: mod_base = OTHER; note = 2'-O-methyladenosine-3'-phosphate
  modified_base 13: mod_base = OTHER; note = 2'-O-methylcytidine-3'-phosphate
  modified_base 14: mod_base = OTHER; note = 2'-deoxy-2'-fluorouridine-3'-phosphate
  modified_base 15: mod_base = OTHER; note = 2'-O-methyladenosine-3'-phosphate
  modified_base 16: mod_base = OTHER; note = 2'-deoxy-2'-fluoroguanosine-3'-phosphate
  modified_base 17: mod_base = OTHER; note = 2'-O-methylcytidine-3'-phosphate
  modified_base 18: mod_base = OTHER; note = 2'-O-methylcytidine-3'-phosphate
  modified_base 19: mod_base = OTHER; note = 2'-O-methylcytidine-3'-phosphate
  modified_base 20: mod_base = OTHER; note = 2'-O-methyladenosine-3'-phosphate
  modified_base 21: mod_base = OTHER; note = 2'-O-methylcytidine-3'-phosphorothioate
  modified_base 22: mod_base = OTHER; note = 2'-O-methyluridine-3'-phosphorothioate
  modified_base 23: mod_base = OTHER; note = 2'-O-methyluridine
tggttgctcacactagcccactt

SEQ ID NO: 802 - RNA, 23 nt, synthetic construct
  source 1..23: mol_type = other RNA
  modified_base 1: mod_base = OTHER; note = 2'-O-methyluridine-3'-phosphorothioate 5'-(E)-Vinylphosphonate
  modified_base 2: mod_base = OTHER; note = 2'-deoxy-2'-fluorouridine-3'-phosphorothioate
  modified_base 3: mod_base = OTHER; note = 2'-O-methylcytidine-3'-phosphate
  modified_base 4: mod_base = OTHER; note = 2'-O-methyluridine-3'-phosphate
  modified_base 5: mod_base = OTHER; note = 2'-O-methylguanosine-3'-phosphate
  modified_base 6: mod_base = OTHER; note = 2'-deoxy-2'-fluoroadenosine-3'-phosphate
  modified_base 7: mod_base = OTHER; note = 2'-O-methyluridine-3'-phosphate
  modified_base 8: mod_base = OTHER; note = 2'-deoxy-2'-fluorouridine-3'-phosphate
  modified_base 9: mod_base = OTHER; note = 2'-deoxy-2'-fluoroadenosine-3'-phosphate
  modified_base 10: mod_base = OTHER; note = 2'-O-methyluridine-3'-phosphate
  modified_base 11: mod_base = OTHER; note = 2'-O-methyluridine-3'-phosphate
  modified_base 12: mod_base = OTHER; note = 2'-O-methylcytidine-3'-phosphate
  modified_base 13: mod_base = OTHER; note = 2'-O-methylcytidine-3'-phosphate
  modified_base 14: mod_base = OTHER; note = 2'-deoxy-2'-fluoroadenosine-3'-phosphate
  modified_base 15: mod_base = OTHER; note = 2'-O-methylguanosine-3'-phosphate
  modified_base 16: mod_base = OTHER; note = 2'-deoxy-2'-fluoroadenosine-3'-phosphate
  modified_base 17: mod_base = OTHER; note = 2'-O-methylcytidine-3'-phosphate
  modified_base 18: mod_base = OTHER; note = 2'-O-methylcytidine-3'-phosphate
  modified_base 19: mod_base = OTHER; note = 2'-O-methyladenosine-3'-phosphate
  modified_base 20: mod_base = OTHER; note = 2'-O-methylcytidine-3'-phosphate
  modified_base 21: mod_base = OTHER; note = 2'-O-methylcytidine-3'-phosphorothioate
  modified_base 22: mod_base = OTHER; note = 2'-O-methyladenosine-3'-phosphorothioate
  modified_base 23: mod_base = OTHER; note = 2'-O-methylguanosine
ttctgattattccagaccaccag

SEQ ID NO: 803 - RNA, 23 nt, synthetic construct
  source 1..23: mol_type = other RNA
  modified_base 1: mod_base = OTHER; note = 2'-O-methyluridine-3'-phosphorothioate 5'-(E)-Vinylphosphonate
  modified_base 2: mod_base = OTHER; note = 2'-deoxy-2'-fluoroadenosine-3'-phosphorothioate
  modified_base 3: mod_base = OTHER; note = 2'-O-methyluridine-3'-phosphate
  modified_base 4: mod_base = OTHER; note = 2'-O-methyluridine-3'-phosphate
  modified_base 5: mod_base = OTHER; note = 2'-O-methylcytidine-3'-phosphate
  modified_base 6: mod_base = OTHER; note = 2'-deoxy-2'-fluorouridine-3'-phosphate
  modified_base 7: mod_base = OTHER; note = 2'-O-methylguanosine-3'-phosphate
  modified_base 8: mod_base = OTHER; note = 2'-deoxy-2'-fluoroadenosine-3'-phosphate
  modified_base 9: mod_base = OTHER; note = 2'-deoxy-2'-fluorouridine-3'-phosphate
  modified_base 10: mod_base = OTHER; note = 2'-O-methyluridine-3'-phosphate
  modified_base 11: mod_base = OTHER; note = 2'-O-methyladenosine-3'-phosphate
  modified_base 12: mod_base = OTHER; note = 2'-O-methyluridine-3'-phosphate
  modified_base 13: mod_base = OTHER; note = 2'-O-methyluridine-3'-phosphate
  modified_base 14: mod_base = OTHER; note = 2'-deoxy-2'-fluorocytidine-3'-phosphate
  modified_base 15: mod_base = OTHER; note = 2'-O-methylcytidine-3'-phosphate
  modified_base 16: mod_base = OTHER; note = 2'-deoxy-2'-fluoroadenosine-3'-phosphate
  modified_base 17: mod_base = OTHER; note = 2'-O-methylguanosine-3'-phosphate
  modified_base 18: mod_base = OTHER; note = 2'-O-methyladenosine-3'-phosphate
  modified_base 19: mod_base = OTHER; note = 2'-O-methylcytidine-3'-phosphate
  modified_base 20: mod_base = OTHER; note = 2'-O-methylcytidine-3'-phosphate
  modified_base 21: mod_base = OTHER; note = 2'-O-methyladenosine-3'-phosphorothioate
  modified_base 22: mod_base = OTHER; note = 2'-O-methylcytidine-3'-phosphorothioate
  modified_base 23: mod_base = OTHER; note = 2'-O-methylcytidine
tattctgattattccagaccacc

SEQ ID NO: 804 - RNA, 23 nt, synthetic construct
  source 1..23: mol_type = other RNA
  modified_base 1: mod_base = OTHER; note = 2'-O-methyluridine-3'-phosphorothioate 5'-(E)-Vinylphosphonate
  modified_base 2: mod_base = OTHER; note = 2'-deoxy-2'-fluorouridine-3'-phosphorothioate
  modified_base 3: mod_base = OTHER; note = 2'-O-methyladenosine-3'-phosphate
  modified_base 4: mod_base = OTHER; note = 2'-O-methyluridine-3'-phosphate
  modified_base 5: mod_base = OTHER; note = 2'-O-methyluridine-3'-phosphate
  modified_base 6: mod_base = OTHER; note = 2'-deoxy-2'-fluorocytidine-3'-phosphate
  modified_base 7: mod_base = OTHER; note = 2'-O-methyluridine-3'-phosphate
  modified_base 8: mod_base = OTHER; note = 2'-deoxy-2'-fluoroguanosine-3'-phosphate
  modified_base 9: mod_base = OTHER; note = 2'-deoxy-2'-fluoroadenosine-3'-phosphate
  modified_base 10: mod_base = OTHER; note = 2'-O-methyluridine-3'-phosphate
  modified_base 11: mod_base = OTHER; note = 2'-O-methyluridine-3'-phosphate
  modified_base 12: mod_base = OTHER; note = 2'-O-methyladenosine-3'-phosphate
  modified_base 13: mod_base = OTHER; note = 2'-O-methyluridine-3'-phosphate
  modified_base 14: mod_base = OTHER; note = 2'-deoxy-2'-fluorouridine-3'-phosphate
  modified_base 15: mod_base = OTHER; note = 2'-O-methylcytidine-3'-phosphate
  modified_base 16: mod_base = OTHER; note = 2'-deoxy-2'-fluorocytidine-3'-phosphate
  modified_base 17: mod_base = OTHER; note = 2'-O-methyladenosine-3'-phosphate
  modified_base 18: mod_base = OTHER; note = 2'-O-methylguanosine-3'-phosphate
  modified_base 19: mod_base = OTHER; note = 2'-O-methyladenosine-3'-phosphate
  modified_base 20: mod_base = OTHER; note = 2'-O-methylcytidine-3'-phosphate
  modified_base 21: mod_base = OTHER; note = 2'-O-methylcytidine-3'-phosphorothioate
  modified_base 22: mod_base = OTHER; note = 2'-O-methyladenosine-3'-phosphorothioate
  modified_base 23: mod_base = OTHER; note = 2'-O-methylcytidine
ttattctgattattccagaccac

SEQ ID NO: 805 - RNA, 23 nt, synthetic construct
  source 1..23: mol_type = other RNA
  modified_base 1: mod_base = OTHER; note = 2'-O-methyluridine-3'-phosphorothioate 5'-(E)-Vinylphosphonate
  modified_base 2: mod_base = OTHER; note = 2'-deoxy-2'-fluoroguanosine-3'-phosphorothioate
  modified_base 3: mod_base = OTHER; note = 2'-O-methylguanosine-3'-phosphate
  modified_base 4: mod_base = OTHER; note = 2'-O-methylguanosine-3'-phosphate
  modified_base 5: mod_base = OTHER; note = 2'-O-methyluridine-3'-phosphate
  modified_base 6: mod_base = OTHER; note = 2'-deoxy-2'-fluorouridine-3'-phosphate
  modified_base 7: mod_base = OTHER; note = 2'-O-methyluridine-3'-phosphate
  modified_base 8: mod_base = OTHER; note = 2'-deoxy-2'-fluorouridine-3'-phosphate
  modified_base 9: mod_base = OTHER; note = 2'-deoxy-2'-fluorouridine-3'-phosphate
  modified_base 10: mod_base = OTHER; note = 2'-O-methyladenosine-3'-phosphate
  modified_base 11: mod_base = OTHER; note = 2'-O-methyluridine-3'-phosphate
  modified_base 12: mod_base = OTHER; note = 2'-O-methyluridine-3'-phosphate
  modified_base 13: mod_base = OTHER; note = 2'-O-methylcytidine-3'-phosphate
  modified_base 14: mod_base = OTHER; note = 2'-deoxy-2'-fluorouridine-3'-phosphate
  modified_base 15: mod_base = OTHER; note = 2'-O-methylguanosine-3'-phosphate
  modified_base 16: mod_base = OTHER; note = 2'-deoxy-2'-fluoroadenosine-3'-phosphate
  modified_base 17: mod_base = OTHER; note = 2'-O-methyluridine-3'-phosphate
  modified_base 18: mod_base = OTHER; note = 2'-O-methyluridine-3'-phosphate
  modified_base 19: mod_base = OTHER; note = 2'-O-methyladenosine-3'-phosphate
  modified_base 20: mod_base = OTHER; note = 2'-O-methyluridine-3'-phosphate
  modified_base 21: mod_base = OTHER; note = 2'-O-methyluridine-3'-phosphorothioate
  modified_base 22: mod_base = OTHER; note = 2'-O-methylcytidine-3'-phosphorothioate
  modified_base 23: mod_base = OTHER; note = 2'-O-methylcytidine
tgggtttttattctgattattcc

SEQ ID NO: 806 - RNA, 23 nt, synthetic construct
  source 1..23: mol_type = other RNA
  modified_base 1: mod_base = OTHER; note = 2'-O-methyluridine-3'-phosphorothioate 5'-(E)-Vinylphosphonate
  modified_base 2: mod_base = OTHER; note = 2'-deoxy-2'-fluoroadenosine-3'-phosphorothioate
  modified_base 3: mod_base = OTHER; note = 2'-O-methylguanosine-3'-phosphate
  modified_base 4: mod_base = OTHER; note = 2'-O-methylguanosine-3'-phosphate
  modified_base 5: mod_base = OTHER; note = 2'-O-methylguanosine-3'-phosphate
  modified_base 6: mod_base = OTHER; note = 2'-deoxy-2'-fluorouridine-3'-phosphate
  modified_base 7: mod_base = OTHER; note = 2'-O-methyluridine-3'-phosphate
  modified_base 8: mod_base = OTHER; note = 2'-deoxy-2'-fluorouridine-3'-phosphate
  modified_base 9: mod_base = OTHER; note = 2'-deoxy-2'-fluorouridine-3'-phosphate
  modified_base 10: mod_base = OTHER; note = 2'-O-methyluridine-3'-phosphate
  modified_base 11: mod_base = OTHER; note = 2'-O-methyladenosine-3'-phosphate
  modified_base 12: mod_base = OTHER; note = 2'-O-methyluridine-3'-phosphate
  modified_base 13: mod_base = OTHER; note = 2'-O-methyluridine-3'-phosphate
  modified_base 14: mod_base = OTHER; note = 2'-deoxy-2'-fluorocytidine-3'-phosphate
  modified_base 15: mod_base = OTHER; note = 2'-O-methyluridine-3'-phosphate
  modified_base 16: mod_base = OTHER; note = 2'-deoxy-2'-fluoroguanosine-3'-phosphate
  modified_base 17: mod_base = OTHER; note = 2'-O-methyladenosine-3'-phosphate
  modified_base 18: mod_base = OTHER; note = 2'-O-methyluridine-3'-phosphate
  modified_base 19: mod_base = OTHER; note = 2'-O-methyluridine-3'-phosphate
  modified_base 20: mod_base = OTHER; note = 2'-O-methyladenosine-3'-phosphate
  modified_base 21: mod_base = OTHER; note = 2'-O-methyluridine-3'-phosphorothioate
  modified_base 22: mod_base = OTHER; note = 2'-O-methyluridine-3'-phosphorothioate
  modified_base 23: mod_base = OTHER; note = 2'-O-methylcytidine
tagggtttttattctgattattc

SEQ ID NO: 807 - RNA, 23 nt, synthetic construct
  source 1..23: mol_type = other RNA
  modified_base 1: mod_base = OTHER; note = 2'-O-methyluridine-3'-phosphorothioate 5'-(E)-Vinylphosphonate
  modified_base 2: mod_base = OTHER; note = 2'-deoxy-2'-fluoroguanosine-3'-phosphorothioate
  modified_base 3: mod_base = OTHER; note = 2'-O-methyladenosine-3'-phosphate
  modified_base 4: mod_base = OTHER; note = 2'-O-methylguanosine-3'-phosphate
  modified_base 5: mod_base = OTHER; note = 2'-O-methylguanosine-3'-phosphate
  modified_base 6: mod_base = OTHER; note = 2'-deoxy-2'-fluoroguanosine-3'-phosphate
  modified_base 7: mod_base = OTHER; note = 2'-O-methyluridine-3'-phosphate
  modified_base 8: mod_base = OTHER; note = 2'-deoxy-2'-fluorouridine-3'-phosphate
  modified_base 9: mod_base = OTHER; note = 2'-deoxy-2'-fluorouridine-3'-phosphate
  modified_base 10: mod_base = OTHER; note = 2'-O-methyluridine-3'-phosphate
  modified_base 11: mod_base = OTHER; note = 2'-O-methyluridine-3'-phosphate
  modified_base 12: mod_base = OTHER; note = 2'-O-methyladenosine-3'-phosphate
  modified_base 13: mod_base = OTHER; note = 2'-O-methyluridine-3'-phosphate
  modified_base 14: mod_base = OTHER; note = 2'-deoxy-2'-fluorouridine-3'-phosphate
  modified_base 15: mod_base = OTHER; note = 2'-O-methylcytidine-3'-phosphate
  modified_base 16: mod_base = OTHER; note = 2'-deoxy-2'-fluorouridine-3'-phosphate
  modified_base 17: mod_base = OTHER; note = 2'-O-methylguanosine-3'-phosphate
  modified_base 18: mod_base = OTHER; note = 2'-O-methyladenosine-3'-phosphate
  modified_base 19: mod_base = OTHER; note = 2'-O-methyluridine-3'-phosphate
  modified_base 20: mod_base = OTHER; note = 2'-O-methyluridine-3'-phosphate
  modified_base 21: mod_base = OTHER; note = 2'-O-methyladenosine-3'-phosphorothioate
  modified_base 22: mod_base = OTHER; note = 2'-O-methyluridine-3'-phosphorothioate
  modified_base 23: mod_base = OTHER; note = 2'-O-methyluridine
tgagggtttttattctgattatt

SEQ ID NO: 808 - RNA, 23 nt, synthetic construct
  source 1..23: mol_type = other RNA
  modified_base 1: mod_base = OTHER; note = 2'-O-methyluridine-3'-phosphorothioate 5'-(E)-Vinylphosphonate
  modified_base 2: mod_base = OTHER; note = 2'-deoxy-2'-fluoroguanosine-3'-phosphorothioate
  modified_base 3: mod_base = OTHER; note = 2'-O-methylguanosine-3'-phosphate
  modified_base 4: mod_base = OTHER; note = 2'-O-methyladenosine-3'-phosphate
  modified_base 5: mod_base = OTHER; note = 2'-O-methylguanosine-3'-phosphate
  modified_base 6: mod_base = OTHER; note = 2'-deoxy-2'-fluoroguanosine-3'-phosphate
  modified_base 7: mod_base = OTHER; note = 2'-O-methylguanosine-3'-phosphate
  modified_base 8: mod_base = OTHER; note = 2'-deoxy-2'-fluorouridine-3'-phosphate
  modified_base 9: mod_base = OTHER; note = 2'-deoxy-2'-fluorouridine-3'-phosphate
  modified_base 10: mod_base = OTHER; note = 2'-O-methyluridine-3'-phosphate
  modified_base 11: mod_base = OTHER; note = 2'-O-methyluridine-3'-phosphate
  modified_base 12: mod_base = OTHER; note = 2'-O-methyluridine-3'-phosphate
  modified_base 13: mod_base = OTHER; note = 2'-O-methyladenosine-3'-phosphate
  modified_base 14: mod_base = OTHER; note = 2'-deoxy-2'-fluorouridine-3'-phosphate
  modified_base 15: mod_base = OTHER; note = 2'-O-methyluridine-3'-phosphate
  modified_base 16: mod_base = OTHER; note = 2'-deoxy-2'-fluorocytidine-3'-phosphate
  modified_base 17: mod_base = OTHER; note = 2'-O-methyluridine-3'-phosphate
  modified_base 18: mod_base = OTHER; note = 2'-O-methylguanosine-3'-phosphate
  modified_base 19: mod_base = OTHER; note = 2'-O-methyladenosine-3'-phosphate
  modified_base 20: mod_base = OTHER; note = 2'-O-methyluridine-3'-phosphate
  modified_base 21: mod_base = OTHER; note = 2'-O-methyluridine-3'-phosphorothioate
  modified_base 22: mod_base = OTHER; note = 2'-O-methyladenosine-3'-phosphorothioate
  modified_base 23: mod_base = OTHER; note = 2'-O-methyluridine
tggagggtttttattctgattat

SEQ ID NO: 809 - RNA, 23 nt, synthetic construct
  source 1..23: mol_type = other RNA
  modified_base 1: mod_base = OTHER; note = 2'-O-methyluridine-3'-phosphorothioate 5'-(E)-Vinylphosphonate
  modified_base 2: mod_base = OTHER; note = 2'-deoxy-2'-fluoroadenosine-3'-phosphorothioate
  modified_base 3: mod_base = OTHER; note = 2'-O-methylcytidine-3'-phosphate
  modified_base 4: mod_base = OTHER; note = 2'-O-methyluridine-3'-phosphate
  modified_base 5: mod_base = OTHER; note = 2'-O-methyluridine-3'-phosphate
  modified_base 6: mod_base = OTHER; note = 2'-deoxy-2'-fluoroadenosine-3'-phosphate
  modified_base 7: mod_base = OTHER; note = 2'-O-methylguanosine-3'-phosphate
  modified_base 8: mod_base = OTHER; note = 2'-deoxy-2'-fluorocytidine-3'-phosphate
  modified_base 9: mod_base = OTHER; note = 2'-deoxy-2'-fluorouridine-3'-phosphate
  modified_base 10: mod_base = OTHER; note = 2'-O-methyluridine-3'-phosphate
  modified_base 11: mod_base = OTHER; note = 2'-O-methylguanosine-3'-phosphate
  modified_base 12: mod_base = OTHER; note = 2'-O-methyluridine-3'-phosphate
  modified_base 13: mod_base = OTHER; note = 2'-O-methyluridine-3'-phosphate
  modified_base 14: mod_base = OTHER; note = 2'-deoxy-2'-fluorouridine-3'-phosphate
  modified_base 15: mod_base = OTHER; note = 2'-O-methyluridine-3'-phosphate
  modified_base 16: mod_base = OTHER; note = 2'-deoxy-2'-fluorocytidine-3'-phosphate
  modified_base 17: mod_base = OTHER; note = 2'-O-methyluridine-3'-phosphate
  modified_base 18: mod_base = OTHER; note = 2'-O-methylguanosine-3'-phosphate
  modified_base 19: mod_base = OTHER; note = 2'-O-methylcytidine-3'-phosphate
  modified_base 20: mod_base = OTHER; note = 2'-O-methyladenosine-3'-phosphate
  modified_base 21: mod_base = OTHER; note = 2'-O-methylguanosine-3'-phosphorothioate
  modified_base 22: mod_base = OTHER; note = 2'-O-methyluridine-3'-phosphorothioate
  modified_base 23: mod_base = OTHER; note = 2'-O-methylcytidine
tacttagcttgttttctgcagtc

SEQ ID NO: 810 - RNA, 23 nt, synthetic construct
  source 1..23: mol_type = other RNA
  modified_base 1: mod_base = OTHER; note = 2'-O-methyluridine-3'-phosphorothioate 5'-(E)-Vinylphosphonate
  modified_base 2: mod_base = OTHER; note = 2'-deoxy-2'-fluoroguanosine-3'-phosphorothioate
  modified_base 3: mod_base = OTHER; note = 2'-O-methyladenosine-3'-phosphate
  modified_base 4: mod_base = OTHER; note = 2'-O-methyluridine-3'-phosphate
  modified_base 5: mod_base = OTHER; note = 2'-O-methyluridine-3'-phosphate
  modified_base 6: mod_base = OTHER; note = 2'-deoxy-2'-fluoroadenosine-3'-phosphate
  modified_base 7: mod_base = OTHER; note = 2'-O-methylcytidine-3'-phosphate
  modified_base 8: mod_base = OTHER; note = 2'-deoxy-2'-fluorouridine-3'-phosphate
  modified_base 9: mod_base = OTHER; note = 2'-deoxy-2'-fluorouridine-3'-phosphate
  modified_base 10: mod_base = OTHER; note = 2'-O-methyladenosine-3'-phosphate
  modified_base 11: mod_base = OTHER; note = 2'-O-methylguanosine-3'-phosphate
  modified_base 12: mod_base = OTHER; note = 2'-O-methylcytidine-3'-phosphate
  modified_base 13: mod_base = OTHER; note = 2'-O-methyluridine-3'-phosphate
  modified_base 14: mod_base = OTHER; note = 2'-deoxy-2'-fluorouridine-3'-phosphate
  modified_base 15: mod_base = OTHER; note = 2'-O-methylguanosine-3'-phosphate
  modified_base 16: mod_base = OTHER; note = 2'-deoxy-2'-fluorouridine-3'-phosphate
  modified_base 17: mod_base = OTHER; note = 2'-O-methyluridine-3'-phosphate
  modified_base 18: mod_base = OTHER; note = 2'-O-methyluridine-3'-phosphate
  modified_base 19: mod_base = OTHER; note = 2'-O-methyluridine-3'-phosphate
  modified_base 20: mod_base = OTHER; note = 2'-O-methylcytidine-3'-phosphate
  modified_base 21: mod_base = OTHER; note = 2'-O-methyluridine-3'-phosphorothioate
  modified_base 22: mod_base = OTHER; note = 2'-O-methylguanosine-3'-phosphorothioate
  modified_base 23: mod_base = OTHER; note = 2'-O-methylcytidine
tgattacttagcttgttttctgc

SEQ ID NO: 811 - RNA, 23 nt, synthetic construct
  source 1..23: mol_type = other RNA
  modified_base 1: mod_base = OTHER; note = 2'-O-methyluridine-3'-phosphorothioate 5'-(E)-Vinylphosphonate
  modified_base 2: mod_base = OTHER; note = 2'-deoxy-2'-fluoroadenosine-3'-phosphorothioate
  modified_base 3: mod_base = OTHER; note = 2'-O-methyladenosine-3'-phosphate
  modified_base 4: mod_base = OTHER; note = 2'-O-methylcytidine-3'-phosphate
  modified_base 5: mod_base = OTHER; note = 2'-O-methylguanosine-3'-phosphate
  modified_base 6: mod_base = OTHER; note = 2'-deoxy-2'-fluoroadenosine-3'-phosphate
  modified_base 7: mod_base = OTHER; note = 2'-O-methyluridine-3'-phosphate
  modified_base 8: mod_base = OTHER; note = 2'-deoxy-2'-fluorouridine-3'-phosphate
  modified_base 9: mod_base = OTHER; note = 2'-deoxy-2'-fluoroadenosine-3'-phosphate
  modified_base 10: mod_base = OTHER; note = 2'-O-methylcytidine-3'-phosphate
  modified_base 11: mod_base = OTHER; note = 2'-O-methyluridine-3'-phosphate
  modified_base 12: mod_base = OTHER; note = 2'-O-methyluridine-3'-phosphate
  modified_base 13: mod_base = OTHER; note = 2'-O-methyladenosine-3'-phosphate
  modified_base 14: mod_base = OTHER; note = 2'-deoxy-2'-fluoroguanosine-3'-phosphate
  modified_base 15: mod_base = OTHER; note = 2'-O-methylcytidine-3'-phosphate
  modified_base 16: mod_base = OTHER; note = 2'-deoxy-2'-fluorouridine-3'-phosphate
  modified_base 17: mod_base = OTHER; note = 2'-O-methyluridine-3'-phosphate
  modified_base 18: mod_base = OTHER; note = 2'-O-methylguanosine-3'-phosphate
  modified_base 19: mod_base = OTHER; note = 2'-O-methyluridine-3'-phosphate
  modified_base 20: mod_base = OTHER; note = 2'-O-methyluridine-3'-phosphate
  modified_base 21: mod_base = OTHER; note = 2'-O-methyluridine-3'-phosphorothioate
  modified_base 22: mod_base = OTHER; note = 2'-O-methyluridine-3'-phosphorothioate
  modified_base 23: mod_base = OTHER; note = 2'-O-methylcytidine
taacgattacttagcttgttttc

SEQ ID NO: 812 - RNA, 23 nt, synthetic construct
  source 1..23: mol_type = other RNA
  modified_base 1: mod_base = OTHER; note = 2'-O-methyluridine-3'-phosphorothioate 5'-(E)-Vinylphosphonate
  modified_base 2: mod_base = OTHER; note = 2'-deoxy-2'-fluoroadenosine-3'-phosphorothioate
  modified_base 3: mod_base = OTHER; note = 2'-O-methyladenosine-3'-phosphate
  modified_base 4: mod_base = OTHER; note = 2'-O-methyladenosine-3'-phosphate
  modified_base 5: mod_base = OTHER; note = 2'-O-methylcytidine-3'-phosphate
  modified_base 6: mod_base = OTHER; note = 2'-deoxy-2'-fluoroguanosine-3'-phosphate
  modified_base 7: mod_base = OTHER; note = 2'-O-methyladenosine-3'-phosphate
  modified_base 8: mod_base = OTHER; note = 2'-deoxy-2'-fluorouridine-3'-phosphate
  modified_base 9: mod_base = OTHER; note = 2'-deoxy-2'-fluorouridine-3'-phosphate
  modified_base 10: mod_base = OTHER; note = 2'-O-methyladenosine-3'-phosphate
  modified_base 11: mod_base = OTHER; note = 2'-O-methylcytidine-3'-phosphate
  modified_base 12: mod_base = OTHER; note = 2'-O-methyluridine-3'-phosphate
  modified_base 13: mod_base = OTHER; note = 2'-O-methyluridine-3'-phosphate
  modified_base 14: mod_base = OTHER; note = 2'-deoxy-2'-fluoroadenosine-3'-phosphate
  modified_base 15: mod_base = OTHER; note = 2'-O-methylguanosine-3'-phosphate
  modified_base 16: mod_base = OTHER; note = 2'-deoxy-2'-fluorocytidine-3'-phosphate
  modified_base 17: mod_base = OTHER; note = 2'-O-methyluridine-3'-phosphate
  modified_base 18: mod_base = OTHER; note = 2'-O-methyluridine-3'-phosphate
  modified_base 19: mod_base = OTHER; note = 2'-O-methylguanosine-3'-phosphate
  modified_base 20: mod_base = OTHER; note = 2'-O-methyluridine-3'-phosphate
  modified_base 21: mod_base = OTHER; note = 2'-O-methyluridine-3'-phosphorothioate
  modified_base 22: mod_base = OTHER; note = 2'-O-methyluridine-3'-phosphorothioate
  modified_base 23: mod_base = OTHER; note = 2'-O-methyluridine
taaacgattacttagcttgtttt

SEQ ID NO: 813 - RNA, 23 nt, synthetic construct
  source 1..23: mol_type = other RNA
  modified_base 1: mod_base = OTHER; note = 2'-O-methyluridine-3'-phosphorothioate 5'-(E)-Vinylphosphonate
  modified_base 2: mod_base = OTHER; note = 2'-deoxy-2'-fluoroguanosine-3'-phosphorothioate
  modified_base 3: mod_base = OTHER; note = 2'-O-methyladenosine-3'-phosphate
  modified_base 4: mod_base = OTHER; note = 2'-O-methyladenosine-3'-phosphate
  modified_base 5: mod_base = OTHER; note = 2'-O-methyladenosine-3'-phosphate
  modified_base 6: mod_base = OTHER; note = 2'-deoxy-2'-fluorocytidine-3'-phosphate
  modified_base 7: mod_base = OTHER; note = 2'-O-methylguanosine-3'-phosphate
  modified_base 8: mod_base = OTHER; note = 2'-deoxy-2'-fluoroadenosine-3'-phosphate
  modified_base 9: mod_base = OTHER; note = 2'-deoxy-2'-fluorouridine-3'-phosphate
  modified_base 10: mod_base = OTHER; note = 2'-O-methyluridine-3'-phosphate
  modified_base 11: mod_base = OTHER; note = 2'-O-methyladenosine-3'-phosphate
  modified_base 12: mod_base = OTHER; note = 2'-O-methylcytidine-3'-phosphate
  modified_base 13: mod_base = OTHER; note = 2'-O-methyluridine-3'-phosphate
  modified_base 14: mod_base = OTHER; note = 2'-deoxy-2'-fluorouridine-3'-phosphate
  modified_base 15: mod_base = OTHER; note = 2'-O-methyladenosine-3'-phosphate
  modified_base 16: mod_base = OTHER; note = 2'-deoxy-2'-fluoroguanosine-3'-phosphate
  modified_base 17: mod_base = OTHER; note = 2'-O-methylcytidine-3'-phosphate
  modified_base 18: mod_base = OTHER; note = 2'-O-methyluridine-3'-phosphate
  modified_base 19: mod_base = OTHER; note = 2'-O-methyluridine-3'-phosphate
  modified_base 20: mod_base = OTHER; note = 2'-O-methylguanosine-3'-phosphate
  modified_base 21: mod_base = OTHER; note = 2'-O-methyluridine-3'-phosphorothioate
  modified_base 22: mod_base = OTHER; note = 2'-O-methyluridine-3'-phosphorothioate
  modified_base 23: mod_base = OTHER; note = 2'-O-methyluridine
tgaaacgattacttagcttgttt

SEQ ID NO: 814 - RNA, 23 nt, synthetic construct
  source 1..23: mol_type = other RNA
  modified_base 1: mod_base = OTHER; note = 2'-O-methyluridine-3'-phosphorothioate 5'-(E)-Vinylphosphonate
  modified_base 2: mod_base = OTHER; note = 2'-deoxy-2'-fluoroadenosine-3'-phosphorothioate
  modified_base 3: mod_base = OTHER; note = 2'-O-methylguanosine-3'-phosphate
  modified_base 4: mod_base = OTHER; note = 2'-O-methyladenosine-3'-phosphate
  modified_base 5: mod_base = OTHER; note = 2'-O-methyladenosine-3'-phosphate
  modified_base 6: mod_base = OTHER; note = 2'-deoxy-2'-fluoroadenosine-3'-phosphate
  modified_base 7: mod_base = OTHER; note = 2'-O-methylcytidine-3'-phosphate
  modified_base 8: mod_base = OTHER; note = 2'-deoxy-2'-fluoroguanosine-3'-phosphate
  modified_base 9: mod_base = OTHER; note = 2'-deoxy-2'-fluoroadenosine-3'-phosphate
  modified_base 10: mod_base = OTHER; note = 2'-O-methyluridine-3'-phosphate
  modified_base 11: mod_base = OTHER; note = 2'-O-methyluridine-3'-phosphate
  modified_base 12: mod_base = OTHER; note = 2'-O-methyladenosine-3'-phosphate
  modified_base 13: mod_base = OTHER; note = 2'-O-methylcytidine-3'-phosphate
  modified_base 14: mod_base = OTHER; note = 2'-deoxy-2'-fluorouridine-3'-phosphate
  modified_base 15: mod_base = OTHER; note = 2'-O-methyluridine-3'-phosphate
  modified_base 16: mod_base = OTHER; note = 2'-deoxy-2'-fluoroadenosine-3'-phosphate
  modified_base 17: mod_base = OTHER; note = 2'-O-methylguanosine-3'-phosphate
  modified_base 18: mod_base = OTHER; note = 2'-O-methylcytidine-3'-phosphate
  modified_base 19: mod_base = OTHER; note = 2'-O-methyluridine-3'-phosphate
  modified_base 20: mod_base = OTHER; note = 2'-O-methyluridine-3'-phosphate
  modified_base 21: mod_base = OTHER; note = 2'-O-methylguanosine-3'-phosphorothioate
  modified_base 22: mod_base = OTHER; note = 2'-O-methyluridine-3'-phosphorothioate
  modified_base 23: mod_base = OTHER; note = 2'-O-methyluridine
tagaaacgattacttagcttgtt

SEQ ID NO: 815 - RNA, 23 nt, synthetic construct
  source 1..23: mol_type = other RNA
  modified_base 1: mod_base = OTHER; note = 2'-O-methyluridine-3'-phosphorothioate 5'-(E)-Vinylphosphonate
  modified_base 2: mod_base = OTHER; note = 2'-deoxy-2'-fluoroadenosine-3'-phosphorothioate
  modified_base 3: mod_base = OTHER; note = 2'-O-methyladenosine-3'-phosphate
  modified_base 4: mod_base = OTHER; note = 2'-O-methylguanosine-3'-phosphate
  modified_base 5: mod_base = OTHER; note = 2'-O-methyladenosine-3'-phosphate
  modified_base 6: mod_base = OTHER; note = 2'-deoxy-2'-fluoroadenosine-3'-phosphate
  modified_base 7: mod_base = OTHER; note = 2'-O-methyladenosine-3'-phosphate
  modified_base 8: mod_base = OTHER; note = 2'-deoxy-2'-fluorocytidine-3'-phosphate
  modified_base 9: mod_base = OTHER; note = 2'-deoxy-2'-fluoroguanosine-3'-phosphate
  modified_base 10: mod_base = OTHER; note = 2'-O-methyladenosine-3'-phosphate
  modified_base 11: mod_base = OTHER; note = 2'-O-methyluridine-3'-phosphate
  modified_base 12: mod_base = OTHER; note = 2'-O-methyluridine-3'-phosphate
  modified_base 13: mod_base = OTHER; note = 2'-O-methyladenosine-3'-phosphate
  modified_base 14: mod_base = OTHER; note = 2'-deoxy-2'-fluorocytidine-3'-phosphate
  modified_base 15: mod_base = OTHER; note = 2'-O-methyluridine-3'-phosphate
  modified_base 16: mod_base = OTHER; note = 2'-deoxy-2'-fluorouridine-3'-phosphate
  modified_base 17: mod_base = OTHER; note = 2'-O-methyladenosine-3'-phosphate
  modified_base 18: mod_base = OTHER; note = 2'-O-methylguanosine-3'-phosphate
  modified_base 19: mod_base = OTHER; note = 2'-O-methylcytidine-3'-phosphate
  modified_base 20: mod_base = OTHER; note = 2'-O-methyluridine-3'-phosphate
  modified_base 21: mod_base = OTHER; note = 2'-O-methyluridine-3'-phosphorothioate
  modified_base 22: mod_base = OTHER; note = 2'-O-methylguanosine-3'-phosphorothioate
  modified_base 23: mod_base = OTHER; note = 2'-O-methyluridine
taagaaacgattacttagcttgt

SEQ ID NO: 816 - RNA, 23 nt, synthetic construct
  source 1..23: mol_type = other RNA
  modified_base 1: mod_base = OTHER; note = 2'-O-methyluridine-3'-phosphorothioate 5'-(E)-Vinylphosphonate
  modified_base 2: mod_base = OTHER; note = 2'-deoxy-2'-fluoroguanosine-3'-phosphorothioate
  modified_base 3: mod_base = OTHER; note = 2'-O-methyladenosine-3'-phosphate
  modified_base 4: mod_base = OTHER; note = 2'-O-methyladenosine-3'-phosphate
  modified_base 5: mod_base = OTHER; note = 2'-O-methylguanosine-3'-phosphate
  modified_base 6: mod_base = OTHER; note = 2'-deoxy-2'-fluoroadenosine-3'-phosphate
  modified_base 7: mod_base = OTHER; note = 2'-O-methyladenosine-3'-phosphate
  modified_base 8: mod_base = OTHER; note = 2'-deoxy-2'-fluoroadenosine-3'-phosphate
  modified_base 9: mod_base = OTHER; note = 2'-deoxy-2'-fluorocytidine-3'-phosphate
  modified_base 10: mod_base = OTHER; note = 2'-O-methylguanosine-3'-phosphate
  modified_base 11: mod_base = OTHER; note = 2'-O-methyladenosine-3'-phosphate
  modified_base 12: mod_base = OTHER; note = 2'-O-methyluridine-3'-phosphate
  modified_base 13: mod_base = OTHER; note = 2'-O-methyluridine-3'-phosphate
  modified_base 14: mod_base = OTHER; note = 2'-deoxy-2'-fluoroadenosine-3'-phosphate
  modified_base 15: mod_base = OTHER; note = 2'-O-methylcytidine-3'-phosphate
  modified_base 16: mod_base = OTHER; note = 2'-deoxy-2'-fluorouridine-3'-phosphate
  modified_base 17: mod_base = OTHER; note = 2'-O-methyluridine-3'-phosphate
  modified_base 18: mod_base = OTHER; note = 2'-O-methyladenosine-3'-phosphate
  modified_base 19: mod_base = OTHER; note = 2'-O-methylguanosine-3'-phosphate
  modified_base 20: mod_base = OTHER; note = 2'-O-methylcytidine-3'-phosphate
  modified_base 21: mod_base = OTHER; note = 2'-O-methyluridine-3'-phosphorothioate
  modified_base 22: mod_base = OTHER; note = 2'-O-methyluridine-3'-phosphorothioate
  modified_base 23: mod_base = OTHER; note = 2'-O-methylguanosine
tgaagaaacgattacttagcttg

SEQ ID NO: 817 - RNA, 23 nt, synthetic construct
  source 1..23: mol_type = other RNA
  modified_base 1: mod_base = OTHER; note = 2'-O-methyluridine-3'-phosphorothioate 5'-(E)-Vinylphosphonate
  modified_base 2: mod_base = OTHER; note = 2'-deoxy-2'-fluoroguanosine-3'-phosphorothioate
  modified_base 3: mod_base = OTHER; note = 2'-O-methylguanosine-3'-phosphate
  modified_base 4: mod_base = OTHER; note = 2'-O-methyladenosine-3'-phosphate
  modified_base 5: mod_base = OTHER; note = 2'-O-methyladenosine-3'-phosphate
  modified_base 6: mod_base = OTHER; note = 2'-deoxy-2'-fluoroguanosine-3'-phosphate
  modified_base 7: mod_base = OTHER; note = 2'-O-methyladenosine-3'-phosphate
  modified_base 8: mod_base = OTHER; note = 2'-deoxy-2'-fluoroadenosine-3'-phosphate
  modified_base 9: mod_base = OTHER; note = 2'-deoxy-2'-fluoroadenosine-3'-phosphate
  modified_base 10: mod_base = OTHER; note = 2'-O-methylcytidine-3'-phosphate
  modified_base 11: mod_base = OTHER; note = 2'-O-methylguanosine-3'-phosphate
  modified_base 12: mod_base = OTHER; note = 2'-O-methyladenosine-3'-phosphate
  modified_base 13: mod_base = OTHER; note = 2'-O-methyluridine-3'-phosphate
  modified_base 14: mod_base = OTHER; note = 2'-deoxy-2'-fluorouridine-3'-phosphate
  modified_base 15: mod_base = OTHER; note = 2'-O-methyladenosine-3'-phosphate
  modified_base 16: mod_base = OTHER; note = 2'-deoxy-2'-fluorocytidine-3'-phosphate
  modified_base 17: mod_base = OTHER; note = 2'-O-methyluridine-3'-phosphate
  modified_base 18: mod_base = OTHER; note = 2'-O-methyluridine-3'-phosphate
  modified_base 19: mod_base = OTHER; note = 2'-O-methyladenosine-3'-phosphate
  modified_base 20: mod_base = OTHER; note = 2'-O-methylguanosine-3'-phosphate
  modified_base 21: mod_base = OTHER; note = 2'-O-methylcytidine-3'-phosphorothioate
  modified_base 22: mod_base = OTHER; note = 2'-O-methyluridine-3'-phosphorothioate
  modified_base 23: mod_base = OTHER; note = 2'-O-methyluridine
tggaagaaacgattacttagctt

SEQ ID NO: 818 - RNA, 23 nt, synthetic construct
  source 1..23: mol_type = other RNA
  modified_base 1: mod_base = OTHER; note = 2'-O-methyluridine-3'-phosphorothioate 5'-(E)-Vinylphosphonate
  modified_base 2: mod_base = OTHER; note = 2'-deoxy-2'-fluoroguanosine-3'-phosphorothioate
  modified_base 3: mod_base = OTHER; note = 2'-O-methylguanosine-3'-phosphate
  modified_base 4: mod_base = OTHER; note = 2'-O-methylguanosine-3'-phosphate
  modified_base 5: mod_base = OTHER; note = 2'-O-methyladenosine-3'-phosphate
  modified_base 6: mod_base = OTHER; note = 2'-deoxy-2'-fluoroadenosine-3'-phosphate
  modified_base 7: mod_base = OTHER; note = 2'-O-methylguanosine-3'-phosphate
  modified_base 8: mod_base = OTHER; note = 2'-deoxy-2'-fluoroadenosine-3'-phosphate
  modified_base 9: mod_base = OTHER; note = 2'-deoxy-2'-fluoroadenosine-3'-phosphate
  modified_base 10: mod_base = OTHER; note = 2'-O-methyladenosine-3'-phosphate
  modified_base 11: mod_base = OTHER; note = 2'-O-methylcytidine-3'-phosphate
  modified_base 12: mod_base = OTHER; note = 2'-O-methylguanosine-3'-phosphate
  modified_base 13: mod_base = OTHER; note = 2'-O-methyladenosine-3'-phosphate
  modified_base 14: mod_base = OTHER; note = 2'-deoxy-2'-fluorouridine-3'-phosphate
  modified_base 15: mod_base = OTHER; note = 2'-O-methyluridine-3'-phosphate
  modified_base 16: mod_base = OTHER; note = 2'-deoxy-2'-fluoroadenosine-3'-phosphate
  modified_base 17: mod_base = OTHER; note = 2'-O-methylcytidine-3'-phosphate
  modified_base 18: mod_base = OTHER; note = 2'-O-methyluridine-3'-phosphate
  modified_base 19: mod_base = OTHER; note = 2'-O-methyluridine-3'-phosphate
  modified_base 20: mod_base = OTHER; note = 2'-O-methyladenosine-3'-phosphate
  modified_base 21: mod_base = OTHER; note = 2'-O-methylguanosine-3'-phosphorothioate
  modified_base 22: mod_base = OTHER; note = 2'-O-methylcytidine-3'-phosphorothioate
  modified_base 23: mod_base = OTHER; note = 2'-O-methyluridine
tgggaagaaacgattacttagct

SEQ ID NO: 819 - RNA, 23 nt, synthetic construct
  source 1..23: mol_type = other RNA
  modified_base 1: mod_base = OTHER; note = 2'-O-methyluridine-3'-phosphorothioate 5'-(E)-Vinylphosphonate
  modified_base 2: mod_base = OTHER; note = 2'-deoxy-2'-fluorocytidine-3'-phosphorothioate
  modified_base 3: mod_base = OTHER; note = 2'-O-methylguanosine-3'-phosphate
  modified_base 4: mod_base = OTHER; note = 2'-O-methyluridine-3'-phosphate
  modified_base 5: mod_base = OTHER; note = 2'-O-methyladenosine-3'-phosphate
  modified_base 6: mod_base = OTHER; note = 2'-deoxy-2'-fluoroadenosine-3'-phosphate
  modified_base 7: mod_base = OTHER; note = 2'-O-methylguanosine-3'-phosphate
  modified_base 8: mod_base = OTHER; note = 2'-deoxy-2'-fluoroguanosine-3'-phosphate
  modified_base 9: mod_base = OTHER; note = 2'-deoxy-2'-fluoroguanosine-3'-phosphate
  modified_base 10: mod_base = OTHER; note = 2'-O-methyladenosine-3'-phosphate
  modified_base 11: mod_base = OTHER; note = 2'-O-methyladenosine-3'-phosphate
  modified_base 12: mod_base = OTHER; note = 2'-O-methylguanosine-3'-phosphate
  modified_base 13: mod_base = OTHER; note = 2'-O-methyladenosine-3'-phosphate
  modified_base 14: mod_base = OTHER; note = 2'-deoxy-2'-fluoroadenosine-3'-phosphate
  modified_base 15: mod_base = OTHER; note = 2'-O-methyladenosine-3'-phosphate
  modified_base 16: mod_base = OTHER; note = 2'-deoxy-2'-fluorocytidine-3'-phosphate
  modified_base 17: mod_base = OTHER; note = 2'-O-methylguanosine-3'-phosphate
  modified_base 18: mod_base = OTHER; note = 2'-O-methyladenosine-3'-phosphate
  modified_base 19: mod_base = OTHER; note = 2'-O-methyluridine-3'-phosphate
  modified_base 20: mod_base = OTHER; note = 2'-O-methyluridine-3'-phosphate
  modified_base 21: mod_base = OTHER; note = 2'-O-methyladenosine-3'-phosphorothioate
  modified_base 22: mod_base = OTHER; note = 2'-O-methylcytidine-3'-phosphorothioate
  modified_base 23: mod_base = OTHER; note = 2'-O-methyluridine
tcgtaagggaagaaacgattact

SEQ ID NO: 820 - RNA, 23 nt, synthetic construct
  source 1..23: mol_type = other RNA
  modified_base 1: mod_base = OTHER; note = 2'-O-methyluridine-3'-phosphorothioate 5'-(E)-Vinylphosphonate
  modified_base 2: mod_base = OTHER; note = 2'-deoxy-2'-fluorouridine-3'-phosphorothioate
  modified_base 3: mod_base = OTHER; note = 2'-O-methylcytidine-3'-phosphate
  modified_base 4: mod_base = OTHER; note = 2'-O-methylguanosine-3'-phosphate
  modified_base 5: mod_base = OTHER; note = 2'-O-methyluridine-3'-phosphate
  modified_base 6: mod_base = OTHER; note = 2'-deoxy-2'-fluoroadenosine-3'-phosphate
  modified_base 7: mod_base = OTHER; note = 2'-O-methyladenosine-3'-phosphate
  modified_base 8: mod_base = OTHER; note = 2'-deoxy-2'-fluoroguanosine-3'-phosphate
  modified_base 9: mod_base = OTHER; note = 2'-deoxy-2'-fluoroguanosine-3'-phosphate
  modified_base 10: mod_base = OTHER; note = 2'-O-methylguanosine-3'-phosphate
  modified_base 11: mod_base = OTHER; note = 2'-O-methyladenosine-3'-phosphate
  modified_base 12: mod_base = OTHER; note = 2'-O-methyladenosine-3'-phosphate
  modified_base 13: mod_base = OTHER; note = 2'-O-methylguanosine-3'-phosphate
  modified_base 14: mod_base = OTHER; note = 2'-deoxy-2'-fluoroadenosine-3'-phosphate
  modified_base 15: mod_base = OTHER; note = 2'-O-methyladenosine-3'-phosphate
  modified_base 16: mod_base = OTHER; note = 2'-deoxy-2'-fluoroadenosine-3'-phosphate
  modified_base 17: mod_base = OTHER; note = 2'-O-methylcytidine-3'-phosphate
  modified_base 18: mod_base = OTHER; note = 2'-O-methylguanosine-3'-phosphate
  modified_base 19: mod_base = OTHER; note = 2'-O-methyladenosine-3'-phosphate
  modified_base 20: mod_base = OTHER; note = 2'-O-methyluridine-3'-phosphate
  modified_base 21: mod_base = OTHER; note = 2'-O-methyluridine-3'-phosphorothioate
  modified_base 22: mod_base = OTHER; note = 2'-O-methyladenosine-3'-phosphorothioate
  modified_base 23: mod_base = OTHER; note = 2'-O-methylcytidine
ttcgtaagggaagaaacgattac

SEQ ID NO: 821 - RNA, 23 nt, synthetic construct
  source 1..23: mol_type = other RNA
  modified_base 1: mod_base = OTHER; note = 2'-O-methyluridine-3'-phosphorothioate 5'-(E)-Vinylphosphonate
  modified_base 2: mod_base = OTHER; note = 2'-deoxy-2'-fluoroguanosine-3'-phosphorothioate
  modified_base 3: mod_base = OTHER; note = 2'-O-methyluridine-3'-phosphate
  modified_base 4: mod_base = OTHER; note = 2'-O-methylcytidine-3'-phosphate
  modified_base 5: mod_base = OTHER; note = 2'-O-methyluridine-3'-phosphate
  modified_base 6: mod_base = OTHER; note = 2'-deoxy-2'-fluorocytidine-3'-phosphate
  modified_base 7: mod_base = OTHER; note = 2'-O-methylguanosine-3'-phosphate
  modified_base 8: mod_base = OTHER; note = 2'-deoxy-2'-fluoroadenosine-3'-phosphate
  modified_base 9: mod_base = OTHER; note = 2'-deoxy-2'-fluorouridine-3'-phosphate
  modified_base 10: mod_base = OTHER; note = 2'-O-methyluridine-3'-phosphate
  modified_base 11: mod_base = OTHER; note = 2'-O-methyluridine-3'-phosphate
  modified_base 12: mod_base = OTHER; note = 2'-O-methylcytidine-3'-phosphate
  modified_base 13: mod_base = OTHER; note = 2'-O-methylguanosine-3'-phosphate
  modified_base 14: mod_base = OTHER; note = 2'-deoxy-2'-fluorouridine-3'-phosphate
  modified_base 15: mod_base = OTHER; note = 2'-O-methylcytidine-3'-phosphate
  modified_base 16: mod_base = OTHER; note = 2'-deoxy-2'-fluoroguanosine-3'-phosphate
  modified_base 17: mod_base = OTHER; note = 2'-O-methyluridine-3'-phosphate
  modified_base 18: mod_base = OTHER; note = 2'-O-methyladenosine-3'-phosphate
  modified_base 19: mod_base = OTHER; note = 2'-O-methyladenosine-3'-phosphate
  modified_base 20: mod_base = OTHER; note = 2'-O-methylguanosine-3'-phosphate
  modified_base 21: mod_base = OTHER; note = 2'-O-methylguanosine-3'-phosphorothioate
  modified_base 22: mod_base = OTHER; note = 2'-O-methylguanosine-3'-phosphorothioate
  modified_base 23: mod_base = OTHER; note = 2'-O-methyladenosine
tgtctcgatttcgtcgtaaggga

SEQ ID NO: 822 - RNA, 23 nt, synthetic construct
  source 1..23: mol_type = other RNA
  modified_base 1: mod_base = OTHER; note = 2'-O-methyluridine-3'-phosphorothioate 5'-(E)-Vinylphosphonate
  modified_base 2: mod_base = OTHER; note = 2'-deoxy-2'-fluoroadenosine-3'-phosphorothioate
  modified_base 3: mod_base = OTHER; note = 2'-O-methyluridine-3'-phosphate
  modified_base 4: mod_base = OTHER; note = 2'-O-methyladenosine-3'-phosphate
  modified_base 5: mod_base = OTHER; note = 2'-O-methyladenosine-3'-phosphate
  modified_base 6: mod_base = OTHER; note = 2'-deoxy-2'-fluorocytidine-3'-phosphate
  modified_base 7: mod_base = OTHER; note = 2'-O-methylcytidine-3'-phosphate
  modified_base 8: mod_base = OTHER; note = 2'-deoxy-2'-fluoroadenosine-3'-phosphate
  modified_base 9: mod_base = OTHER; note = 2'-deoxy-2'-fluoroadenosine-3'-phosphate
  modified_base 10: mod_base = OTHER; note = 2'-O-methyladenosine-3'-phosphate
  modified_base 11: mod_base = OTHER; note = 2'-O-methylcytidine-3'-phosphate
  modified_base 12: mod_base = OTHER; note = 2'-O-methyluridine-3'-phosphate
  modified_base 13: mod_base = OTHER; note = 2'-O-methylguanosine-3'-phosphate
  modified_base 14: mod_base = OTHER; note = 2'-deoxy-2'-fluorocytidine-3'-phosphate
  modified_base 15: mod_base = OTHER; note = 2'-O-methyladenosine-3'-phosphate
  modified_base 16: mod_base = OTHER; note = 2'-deoxy-2'-fluoroguanosine-3'-phosphate
  modified_base 17: mod_base = OTHER; note = 2'-O-methylcytidine-3'-phosphate
  modified_base 18: mod_base = OTHER; note = 2'-O-methyluridine-3'-phosphate
  modified_base 19: mod_base = OTHER; note = 2'-O-methylcytidine-3'-phosphate
  modified_base 20: mod_base = OTHER; note = 2'-O-methylguanosine-3'-phosphate
  modified_base 21: mod_base = OTHER; note = 2'-O-methyluridine-3'-phosphorothioate
  modified_base 22: mod_base = OTHER; note = 2'-O-methylcytidine-3'-phosphorothioate
  modified_base 23: mod_base = OTHER; note = 2'-O-methyladenosine
tataaccaaactgcagctcgtca

SEQ ID NO: 823 - RNA, 23 nt, synthetic construct
  source 1..23: mol_type = other RNA
  modified_base 1: mod_base = OTHER; note = 2'-O-methyluridine-3'-phosphorothioate 5'-(E)-Vinylphosphonate
  modified_base 2: mod_base = OTHER; note = 2'-deoxy-2'-fluorouridine-3'-phosphorothioate
  modified_base 3: mod_base = OTHER; note = 2'-O-methylcytidine-3'-phosphate
  modified_base 4: mod_base = OTHER; note = 2'-O-methyladenosine-3'-phosphate
  modified_base 5: mod_base = OTHER; note = 2'-O-methyluridine-3'-phosphate
  modified_base 6: mod_base = OTHER; note = 2'-deoxy-2'-fluoroadenosine-3'-phosphate
  modified_base 7: mod_base = OTHER; note = 2'-O-methyladenosine-3'-phosphate
  modified_base 8: mod_base = OTHER; note = 2'-deoxy-2'-fluorocytidine-3'-phosphate
  modified_base 9: mod_base = OTHER; note = 2'-deoxy-2'-fluorocytidine-3'-phosphate
  modified_base 10: mod_base = OTHER; note = 2'-O-methyladenosine-3'-phosphate
  modified_base 11: mod_base = OTHER; note = 2'-O-methyladenosine-3'-phosphate
  modified_base 12: mod_base = OTHER; note = 2'-O-methyladenosine-3'-phosphate
  modified_base 13: mod_base = OTHER; note = 2'-O-methylcytidine-3'-phosphate
  modified_base 14: mod_base = OTHER; note = 2'-deoxy-2'-fluorouridine-3'-phosphate
  modified_base 15: mod_base = OTHER; note = 2'-O-methylguanosine-3'-phosphate
  modified_base 16: mod_base = OTHER; note = 2'-deoxy-2'-fluorocytidine-3'-phosphate
  modified_base 17: mod_base = OTHER; note = 2'-O-methyladenosine-3'-phosphate
  modified_base 18: mod_base = OTHER; note = 2'-O-methylguanosine-3'-phosphate
  modified_base 19: mod_base = OTHER; note = 2'-O-methylcytidine-3'-phosphate
  modified_base 20: mod_base = OTHER; note = 2'-O-methyluridine-3'-phosphate
  modified_base 21: mod_base = OTHER; note = 2'-O-methylcytidine-3'-phosphorothioate
  modified_base 22: mod_base = OTHER; note = 2'-O-methylguanosine-3'-phosphorothioate
  modified_base 23: mod_base = OTHER; note = 2'-O-methyluridine
ttcataaccaaactgcagctcgt

SEQ ID NO: 824 - RNA, 23 nt, synthetic construct
  source 1..23: mol_type = other RNA
  modified_base 1: mod_base = OTHER; note = 2'-O-methyluridine-3'-phosphorothioate 5'-(E)-Vinylphosphonate
  modified_base 2: mod_base = OTHER; note = 2'-deoxy-2'-fluorocytidine-3'-phosphorothioate
  modified_base 3: mod_base = OTHER; note = 2'-O-methyluridine-3'-phosphate
  modified_base 4: mod_base = OTHER; note = 2'-O-methyluridine-3'-phosphate
  modified_base 5: mod_base = OTHER; note = 2'-O-methylcytidine-3'-phosphate
  modified_base 6: mod_base = OTHER; note = 2'-deoxy-2'-fluoroadenosine-3'-phosphate
  modified_base 7: mod_base = OTHER; note = 2'-O-methylcytidine-3'-phosphate
  modified_base 8: mod_base = OTHER; note = 2'-deoxy-2'-fluoroadenosine-3'-phosphate
  modified_base 9: mod_base = OTHER; note = 2'-deoxy-2'-fluoroguanosine-3'-phosphate
  modified_base 10: mod_base = OTHER; note = 2'-O-methyluridine-3'-phosphate
  modified_base 11: mod_base = OTHER; note = 2'-O-methyluridine-3'-phosphate
  modified_base 12: mod_base = OTHER; note = 2'-O-methylcytidine-3'-phosphate
  modified_base 13: mod_base = OTHER; note = 2'-O-methyladenosine-3'-phosphate
  modified_base 14: mod_base = OTHER; note = 2'-deoxy-2'-fluorouridine-3'-phosphate
  modified_base 15: mod_base = OTHER; note = 2'-O-methylguanosine-3'-phosphate
  modified_base 16: mod_base = OTHER; note = 2'-deoxy-2'-fluorouridine-3'-phosphate
  modified_base 17: mod_base = OTHER; note = 2'-O-methylguanosine-3'-phosphate
  modified_base 18: mod_base = OTHER; note = 2'-O-methyladenosine-3'-phosphate
  modified_base 19: mod_base = OTHER; note = 2'-O-methylguanosine-3'-phosphate
  modified_base 20: mod_base = OTHER; note = 2'-O-methyluridine-3'-phosphate
  modified_base 21: mod_base = OTHER; note = 2'-O-methyladenosine-3'-phosphorothioate
  modified_base 22: mod_base = OTHER; note = 2'-O-methyluridine-3'-phosphorothioate
  modified_base 23: mod_base = OTHER; note = 2'-O-methylcytidine
tcttcacagttcatgtgagtatc

SEQ ID NO: 825 - RNA, 23 nt, synthetic construct
  source 1..23: mol_type = other RNA
  modified_base 1: mod_base = OTHER; note = 2'-O-methyluridine-3'-phosphorothioate 5'-(E)-Vinylphosphonate
  modified_base 2: mod_base = OTHER; note = 2'-deoxy-2'-fluorocytidine-3'-phosphorothioate
  modified_base 3: mod_base = OTHER; note = 2'-O-methyladenosine-3'-phosphate
  modified_base 4: mod_base = OTHER; note = 2'-O-methyladenosine-3'-phosphate
  modified_base 5: mod_base = OTHER; note = 2'-O-methyluridine-3'-phosphate
  modified_base 6: mod_base = OTHER; note = 2'-deoxy-2'-fluoroadenosine-3'-phosphate
  modified_base 7: mod_base = OTHER; note = 2'-O-methyluridine-3'-phosphate
  modified_base 8: mod_base = OTHER; note = 2'-deoxy-2'-fluorocytidine-3'-phosphate
  modified_base 9: mod_base = OTHER; note = 2'-deoxy-2'-fluorouridine-3'-phosphate
  modified_base 10: mod_base = OTHER; note = 2'-O-methyluridine-3'-phosphate
  modified_base 11: mod_base = OTHER; note = 2'-O-methylcytidine-3'-phosphate
  modified_base 12: mod_base = OTHER; note = 2'-O-methyladenosine-3'-phosphate
  modified_base 13: mod_base = OTHER; note = 2'-O-methylcytidine-3'-phosphate
  modified_base 14: mod_base = OTHER; note = 2'-deoxy-2'-fluoroadenosine-3'-phosphate
  modified_base 15: mod_base = OTHER; note = 2'-O-methylguanosine-3'-phosphate
  modified_base 16: mod_base = OTHER; note = 2'-deoxy-2'-fluorouridine-3'-phosphate
  modified_base 17: mod_base = OTHER; note = 2'-O-methyluridine-3'-phosphate
  modified_base 18: mod_base = OTHER; note = 2'-O-methylcytidine-3'-phosphate
  modified_base 19: mod_base = OTHER; note = 2'-O-methyladenosine-3'-phosphate
  modified_base 20: mod_base = OTHER; note = 2'-O-methyluridine-3'-phosphate
  modified_base 21: mod_base = OTHER; note = 2'-O-methylguanosine-3'-phosphorothioate
  modified_base 22: mod_base = OTHER; note = 2'-O-methyluridine-3'-phosphorothioate
  modified_base 23: mod_base = OTHER; note = 2'-O-methylguanosine
tcaatatcttcacagttcatgtg

SEQ ID NO: 826 - RNA, 23 nt, synthetic construct
  source 1..23: mol_type = other RNA
  modified_base 1: mod_base = OTHER; note = 2'-O-methyluridine-3'-phosphorothioate 5'-(E)-Vinylphosphonate
  modified_base 2: mod_base = OTHER; note = 2'-deoxy-2'-fluoroguanosine-3'-phosphorothioate
  modified_base 3: mod_base = OTHER; note = 2'-O-methylcytidine-3'-phosphate
  modified_base 4: mod_base = OTHER; note = 2'-O-methyladenosine-3'-phosphate
  modified_base 5: mod_base = OTHER; note = 2'-O-methyladenosine-3'-phosphate
  modified_base 6: mod_base = OTHER; note = 2'-deoxy-2'-fluorouridine-3'-phosphate
  modified_base 7: mod_base = OTHER; note = 2'-O-methyladenosine-3'-phosphate
  modified_base 8: mod_base = OTHER; note = 2'-deoxy-2'-fluorouridine-3'-phosphate
  modified_base 9: mod_base = OTHER; note = 2'-deoxy-2'-fluorocytidine-3'-phosphate
  modified_base 10: mod_base = OTHER; note = 2'-O-methyluridine-3'-phosphate
  modified_base 11: mod_base = OTHER; note = 2'-O-methyluridine-3'-phosphate
  modified_base 12: mod_base = OTHER; note = 2'-O-methylcytidine-3'-phosphate
  modified_base 13: mod_base = OTHER; note = 2'-O-methyladenosine-3'-phosphate
  modified_base 14: mod_base = OTHER; note = 2'-deoxy-2'-fluorocytidine-3'-phosphate
  modified_base 15: mod_base = OTHER; note = 2'-O-methyladenosine-3'-phosphate
  modified_base 16: mod_base = OTHER; note = 2'-deoxy-2'-fluoroguanosine-3'-phosphate
  modified_base 17: mod_base = OTHER; note = 2'-O-methyluridine-3'-phosphate
  modified_base 18: mod_base = OTHER; note = 2'-O-methyluridine-3'-phosphate
  modified_base 19: mod_base = OTHER; note = 2'-O-methylcytidine-3'-phosphate
  modified_base 20: mod_base = OTHER; note = 2'-O-methyladenosine-3'-phosphate
  modified_base 21: mod_base = OTHER; note = 2'-O-methyluridine-3'-phosphorothioate
  modified_base 22: mod_base = OTHER; note = 2'-O-methylguanosine-3'-phosphorothioate
  modified_base 23: mod_base = OTHER; note = 2'-O-methyluridine
tgcaatatcttcacagttcatgt

SEQ ID NO: 827 - RNA, 23 nt, synthetic construct
  source 1..23: mol_type = other RNA
  modified_base 1: mod_base = OTHER; note = 2'-O-methyluridine-3'-phosphorothioate 5'-(E)-Vinylphosphonate
  modified_base 2: mod_base = OTHER; note = 2'-deoxy-2'-fluoroguanosine-3'-phosphorothioate
  modified_base 3: mod_base = OTHER; note = 2'-O-methylguanosine-3'-phosphate
  modified_base 4: mod_base = OTHER; note = 2'-O-methylcytidine-3'-phosphate
  modified_base 5: mod_base = OTHER; note = 2'-O-methyladenosine-3'-phosphate
  modified_base 6: mod_base = OTHER; note = 2'-deoxy-2'-fluoroadenosine-3'-phosphate
  modified_base 7: mod_base = OTHER; note = 2'-O-methyluridine-3'-phosphate
  modified_base 8: mod_base = OTHER; note = 2'-deoxy-2'-fluoroadenosine-3'-phosphate
  modified_base 9: mod_base = OTHER; note = 2'-deoxy-2'-fluorouridine-3'-phosphate
  modified_base 10: mod_base = OTHER; note = 2'-O-methylcytidine-3'-phosphate
  modified_base 11: mod_base = OTHER; note = 2'-O-methyluridine-3'-phosphate
  modified_base 12: mod_base = OTHER; note = 2'-O-methyluridine-3'-phosphate
  modified_base 13: mod_base = OTHER; note = 2'-O-methylcytidine-3'-phosphate
  modified_base 14: mod_base = OTHER; note = 2'-deoxy-2'-fluoroadenosine-3'-phosphate
  modified_base 15: mod_base = OTHER; note = 2'-O-methylcytidine-3'-phosphate
  modified_base 16: mod_base = OTHER; note = 2'-deoxy-2'-fluoroadenosine-3'-phosphate
  modified_base 17: mod_base = OTHER; note = 2'-O-methylguanosine-3'-phosphate
  modified_base 18: mod_base = OTHER; note = 2'-O-methyluridine-3'-phosphate
  modified_base 19: mod_base = OTHER; note = 2'-O-methyluridine-3'-phosphate
  modified_base 20: mod_base = OTHER; note = 2'-O-methylcytidine-3'-phosphate
  modified_base 21: mod_base = OTHER; note = 2'-O-methyladenosine-3'-phosphorothioate
  modified_base 22: mod_base = OTHER; note = 2'-O-methyluridine-3'-phosphorothioate
  modified_base 23: mod_base = OTHER; note = 2'-O-methylguanosine
tggcaatatcttcacagttcatg

SEQ ID NO: 828 - RNA, 23 nt, synthetic construct
  source 1..23: mol_type = other RNA
  modified_base 1: mod_base = OTHER; note = 2'-O-methyluridine-3'-phosphorothioate 5'-(E)-Vinylphosphonate
  modified_base 2: mod_base = OTHER; note = 2'-deoxy-2'-fluorouridine-3'-phosphorothioate
  modified_base 3: mod_base = OTHER; note = 2'-O-methylcytidine-3'-phosphate
  modified_base 4: mod_base = OTHER; note = 2'-O-methyladenosine-3'-phosphate
  modified_base 5: mod_base = OTHER; note = 2'-O-methyluridine-3'-phosphate
  modified_base 6: mod_base = OTHER; note = 2'-deoxy-2'-fluoroguanosine-3'-phosphate
  modified_base 7: mod_base = OTHER; note = 2'-O-methylguanosine-3'-phosphate
  modified_base 8: mod_base = OTHER; note = 2'-deoxy-2'-fluorocytidine-3'-phosphate
  modified_base 9: mod_base = OTHER; note = 2'-deoxy-2'-fluoroadenosine-3'-phosphate
  modified_base 10: mod_base = OTHER; note = 2'-O-methyladenosine-3'-phosphate
  modified_base 11: mod_base = OTHER; note = 2'-O-methyluridine-3'-phosphate
  modified_base 12: mod_base = OTHER; note = 2'-O-methyladenosine-3'-phosphate
  modified_base 13: mod_base = OTHER; note = 2'-O-methyluridine-3'-phosphate
  modified_base 14: mod_base = OTHER; note = 2'-deoxy-2'-fluorocytidine-3'-phosphate
  modified_base 15: mod_base = OTHER; note = 2'-O-methyluridine-3'-phosphate
  modified_base 16: mod_base = OTHER; note = 2'-deoxy-2'-fluorouridine-3'-phosphate
  modified_base 17: mod_base = OTHER; note = 2'-O-methylcytidine-3'-phosphate
  modified_base 18: mod_base = OTHER; note = 2'-O-methyladenosine-3'-phosphate
  modified_base 19: mod_base = OTHER; note = 2'-O-methylcytidine-3'-phosphate
  modified_base 20: mod_base = OTHER; note = 2'-O-methyladenosine-3'-phosphate
  modified_base 21: mod_base = OTHER; note = 2'-O-methylguanosine-3'-phosphorothioate
  modified_base 22: mod_base = OTHER; note = 2'-O-methyluridine-3'-phosphorothioate
  modified_base 23: mod_base = OTHER; note = 2'-O-methyluridine
ttcatggcaatatcttcacagtt

SEQ ID NO: 829 - RNA, 23 nt, synthetic construct
  source 1..23: mol_type = other RNA
  modified_base 1: mod_base = OTHER; note = 2'-O-methyluridine-3'-phosphorothioate 5'-(E)-Vinylphosphonate
  modified_base 2: mod_base = OTHER; note = 2'-deoxy-2'-fluoroadenosine-3'-phosphorothioate
  modified_base 3: mod_base = OTHER; note = 2'-O-methyluridine-3'-phosphate
  modified_base 4: mod_base = OTHER; note = 2'-O-methyluridine-3'-phosphate
  modified_base 5: mod_base = OTHER; note = 2'-O-methylcytidine-3'-phosphate
  modified_base 6: mod_base = OTHER; note = 2'-deoxy-2'-fluoroadenosine-3'-phosphate
  modified_base 7: mod_base = OTHER; note = 2'-O-methyluridine-3'-phosphate
  modified_base 8: mod_base = OTHER; note = 2'-deoxy-2'-fluoroguanosine-3'-phosphate
  modified_base 9: mod_base = OTHER; note = 2'-deoxy-2'-fluoroguanosine-3'-phosphate
  modified_base 10: mod_base = OTHER; note = 2'-O-methylcytidine-3'-phosphate
  modified_base 11: mod_base = OTHER; note = 2'-O-methyladenosine-3'-phosphate
  modified_base 12: mod_base = OTHER; note = 2'-O-methyladenosine-3'-phosphate
  modified_base 13: mod_base = OTHER; note = 2'-O-methyluridine-3'-phosphate
  modified_base 14: mod_base = OTHER; note = 2'-deoxy-2'-fluoroadenosine-3'-phosphate
  modified_base 15: mod_base = OTHER; note = 2'-O-methyluridine-3'-phosphate
  modified_base 16: mod_base = OTHER; note = 2'-deoxy-2'-fluorocytidine-3'-phosphate
  modified_base 17: mod_base = OTHER; note = 2'-O-methyluridine-3'-phosphate
  modified_base 18: mod_base = OTHER; note = 2'-O-methyluridine-3'-phosphate
  modified_base 19: mod_base = OTHER; note = 2'-O-methylcytidine-3'-phosphate
  modified_base 20: mod_base = OTHER; note = 2'-O-methyladenosine-3'-phosphate
  modified_base 21: mod_base = OTHER; note = 2'-O-methylcytidine-3'-phosphorothioate
  modified_base 22: mod_base = OTHER; note = 2'-O-methyladenosine-3'-phosphorothioate
  modified_base 23: mod_base = OTHER; note = 2'-O-methylguanosine
tattcatggcaatatcttcacag

SEQ ID NO: 830 - RNA, 23 nt, synthetic construct
  source 1..23: mol_type = other RNA
  modified_base 1: mod_base = OTHER; note = 2'-O-methyluridine-3'-phosphorothioate 5'-(E)-Vinylphosphonate
  modified_base 2: mod_base = OTHER; note = 2'-deoxy-2'-fluorouridine-3'-phosphorothioate
  modified_base 3: mod_base = OTHER; note = 2'-O-methyladenosine-3'-phosphate
  modified_base 4: mod_base = OTHER; note = 2'-O-methylcytidine-3'-phosphate
  modified_base 5: mod_base = OTHER; note = 2'-O-methylcytidine-3'-phosphate
  modified_base 6: mod_base = OTHER; note = 2'-deoxy-2'-fluorouridine-3'-phosphate
  modified_base 7: mod_base = OTHER; note = 2'-O-methyluridine-3'-phosphate
  modified_base 8: mod_base = OTHER; note = 2'-deoxy-2'-fluoroguanosine-3'-phosphate
  modified_base 9: mod_base = OTHER; note = 2'-deoxy-2'-fluoroadenosine-3'-phosphate
  modified_base 10: mod_base = OTHER; note = 2'-O-methyluridine-3'-phosphate
  modified_base 11: mod_base = OTHER; note = 2'-O-methylguanosine-3'-phosphate
  modified_base 12: mod_base = OTHER; note = 2'-O-methyladenosine-3'-phosphate
  modified_base 13: mod_base = OTHER; note = 2'-O-methylcytidine-3'-phosphate
  modified_base 14: mod_base = OTHER; note = 2'-deoxy-2'-fluoroadenosine-3'-phosphate
  modified_base 15: mod_base = OTHER; note = 2'-O-methylguanosine-3'-phosphate
  modified_base 16: mod_base = OTHER; note = 2'-deoxy-2'-fluorocytidine-3'-phosphate
  modified_base 17: mod_base = OTHER; note = 2'-O-methyluridine-3'-phosphate
  modified_base 18: mod_base = OTHER; note = 2'-O-methyluridine-3'-phosphate
  modified_base 19: mod_base = OTHER; note = 2'-O-methyluridine-3'-phosphate
  modified_base 20: mod_base = OTHER; note = 2'-O-methylcytidine-3'-phosphate
  modified_base 21: mod_base = OTHER; note = 2'-O-methylcytidine-3'-phosphorothioate
  modified_base 22: mod_base = OTHER; note = 2'-O-methylcytidine-3'-phosphorothioate
  modified_base 23: mod_base = OTHER; note = 2'-O-methyluridine
ttaccttgatgacagctttccct

SEQ ID NO: 831 - RNA, 23 nt, synthetic construct
  source 1..23: mol_type = other RNA
  modified_base 1: mod_base = OTHER; note = 2'-O-methyluridine-3'-phosphorothioate 5'-(E)-Vinylphosphonate
  modified_base 2: mod_base = OTHER; note = 2'-deoxy-2'-fluorouridine-3'-phosphorothioate
  modified_base 3: mod_base = OTHER; note = 2'-O-methyluridine-3'-phosphate
  modified_base 4: mod_base = OTHER; note = 2'-O-methyladenosine-3'-phosphate
  modified_base 5: mod_base = OTHER; note = 2'-O-methylcytidine-3'-phosphate
  modified_base 6: mod_base = OTHER; note = 2'-deoxy-2'-fluorocytidine-3'-phosphate
  modified_base 7: mod_base = OTHER; note = 2'-O-methyluridine-3'-phosphate
  modified_base 8: mod_base = OTHER; note = 2'-deoxy-2'-fluorouridine-3'-phosphate
  modified_base 9: mod_base = OTHER; note = 2'-deoxy-2'-fluoroguanosine-3'-phosphate
  modified_base 10: mod_base = OTHER; note = 2'-O-methyladenosine-3'-phosphate
  modified_base 11: mod_base = OTHER; note = 2'-O-methyluridine-3'-phosphate
  modified_base 12: mod_base = OTHER; note = 2'-O-methylguanosine-3'-phosphate
  modified_base 13: mod_base = OTHER; note = 2'-O-methyladenosine-3'-phosphate
  modified_base 14: mod_base = OTHER; note = 2'-deoxy-2'-fluorocytidine-3'-phosphate
  modified_base 15: mod_base = OTHER; note = 2'-O-methyladenosine-3'-phosphate
  modified_base 16: mod_base = OTHER; note = 2'-deoxy-2'-fluoroguanosine-3'-phosphate
  modified_base 17: mod_base = OTHER; note = 2'-O-methylcytidine-3'-phosphate
  modified_base 18: mod_base = OTHER; note = 2'-O-methyluridine-3'-phosphate
  modified_base 19: mod_base = OTHER; note = 2'-O-methyluridine-3'-phosphate
  modified_base 20: mod_base = OTHER; note = 2'-O-methyluridine-3'-phosphate
  modified_base 21: mod_base = OTHER; note = 2'-O-methylcytidine-3'-phosphorothioate
  modified_base 22: mod_base = OTHER; note = 2'-O-methylcytidine-3'-phosphorothioate
  modified_base 23: mod_base = OTHER; note = 2'-O-methylcytidine
tttaccttgatgacagctttccc

SEQ ID NO: 832 - RNA, 23 nt, synthetic construct
  source 1..23: mol_type = other RNA
  modified_base 1: mod_base = OTHER; note = 2'-O-methyluridine-3'-phosphorothioate 5'-(E)-Vinylphosphonate
  modified_base 2: mod_base = OTHER; note = 2'-deoxy-2'-fluoroguanosine-3'-phosphorothioate
  modified_base 3: mod_base = OTHER; note = 2'-O-methyluridine-3'-phosphate
  modified_base 4: mod_base = OTHER; note = 2'-O-methyluridine-3'-phosphate
  modified_base 5: mod_base = OTHER; note = 2'-O-methyladenosine-3'-phosphate
  modified_base 6: mod_base = OTHER; note = 2'-deoxy-2'-fluorocytidine-3'-phosphate
  modified_base 7: mod_base = OTHER; note = 2'-O-methylcytidine-3'-phosphate
  modified_base 8: mod_base = OTHER; note = 2'-deoxy-2'-fluorouridine-3'-phosphate
  modified_base 9: mod_base = OTHER; note = 2'-deoxy-2'-fluorouridine-3'-phosphate
  modified_base 10: mod_base = OTHER; note = 2'-O-methylguanosine-3'-phosphate
  modified_base 11: mod_base = OTHER; note = 2'-O-methyladenosine-3'-phosphate
  modified_base 12: mod_base = OTHER; note = 2'-O-methyluridine-3'-phosphate
  modified_base 13: mod_base = OTHER; note = 2'-O-methylguanosine-3'-phosphate
  modified_base 14: mod_base = OTHER; note = 2'-deoxy-2'-fluoroadenosine-3'-phosphate
  modified_base 15: mod_base = OTHER; note = 2'-O-methylcytidine-3'-phosphate
  modified_base 16: mod_base = OTHER; note = 2'-deoxy-2'-fluoroadenosine-3'-phosphate
  modified_base 17: mod_base = OTHER; note = 2'-O-methylguanosine-3'-phosphate
  modified_base 18: mod_base = OTHER; note = 2'-O-methylcytidine-3'-phosphate
  modified_base 19: mod_base = OTHER; note = 2'-O-methyluridine-3'-phosphate
  modified_base 20: mod_base = OTHER; note = 2'-O-methyluridine-3'-phosphate
  modified_base 21: mod_base = OTHER; note = 2'-O-methyluridine-3'-phosphorothioate
  modified_base 22: mod_base = OTHER; note = 2'-O-methylcytidine-3'-phosphorothioate
  modified_base 23: mod_base = OTHER; note = 2'-O-methylcytidine
tgttaccttgatgacagctttcc

SEQ ID NO: 833 - RNA, 23 nt, synthetic construct
  source 1..23: mol_type = other RNA
  modified_base 1: mod_base = OTHER; note = 2'-O-methyluridine-3'-phosphorothioate 5'-(E)-Vinylphosphonate
  modified_base 2: mod_base = OTHER; note = 2'-deoxy-2'-fluoroguanosine-3'-phosphorothioate
  modified_base 3: mod_base = OTHER; note = 2'-O-methylguanosine-3'-phosphate
  modified_base 4: mod_base = OTHER; note = 2'-O-methyluridine-3'-phosphate
  modified_base 5: mod_base = OTHER; note = 2'-O-methyluridine-3'-phosphate
  modified_base 6: mod_base = OTHER; note = 2'-deoxy-2'-fluoroadenosine-3'-phosphate
  modified_base 7: mod_base = OTHER; note = 2'-O-methylcytidine-3'-phosphate
  modified_base 8: mod_base = OTHER; note = 2'-deoxy-2'-fluorocytidine-3'-phosphate
  modified_base 9: mod_base = OTHER; note = 2'-deoxy-2'-fluorouridine-3'-phosphate
  modified_base 10: mod_base = OTHER; note = 2'-O-methyluridine-3'-phosphate
  modified_base 11: mod_base = OTHER; note = 2'-O-methylguanosine-3'-phosphate
  modified_base 12: mod_base = OTHER; note = 2'-O-methyladenosine-3'-phosphate
  modified_base 13: mod_base = OTHER; note = 2'-O-methyluridine-3'-phosphate
  modified_base 14: mod_base = OTHER; note = 2'-deoxy-2'-fluoroguanosine-3'-phosphate
  modified_base 15: mod_base = OTHER; note = 2'-O-methyladenosine-3'-phosphate
  modified_base 16: mod_base = OTHER; note = 2'-deoxy-2'-fluorocytidine-3'-phosphate
  modified_base 17: mod_base = OTHER; note = 2'-O-methyladenosine-3'-phosphate
  modified_base 18: mod_base = OTHER; note = 2'-O-methylguanosine-3'-phosphate
  modified_base 19: mod_base = OTHER; note = 2'-O-methylcytidine-3'-phosphate
  modified_base 20: mod_base = OTHER; note = 2'-O-methyluridine-3'-phosphate
  modified_base 21: mod_base = OTHER; note = 2'-O-methyluridine-3'-phosphorothioate
  modified_base 22: mod_base = OTHER; note = 2'-O-methyluridine-3'-phosphorothioate
  modified_base 23: mod_base = OTHER; note = 2'-O-methylcytidine
tggttaccttgatgacagctttc

SEQ ID NO: 834 - RNA, 23 nt, synthetic construct
  source 1..23: mol_type = other RNA
  modified_base 1: mod_base = OTHER; note = 2'-O-methyluridine-3'-phosphorothioate 5'-(E)-Vinylphosphonate
  modified_base 2: mod_base = OTHER; note = 2'-deoxy-2'-fluoroguanosine-3'-phosphorothioate
  modified_base 3: mod_base = OTHER; note = 2'-O-methyluridine-3'-phosphate
  modified_base 4: mod_base = OTHER; note = 2'-O-methylguanosine-3'-phosphate
  modified_base 5: mod_base = OTHER; note = 2'-O-methylcytidine-3'-phosphate
  modified_base 6: mod_base = OTHER; note = 2'-deoxy-2'-fluoroadenosine-3'-phosphate
  modified_base 7: mod_base = OTHER; note = 2'-O-methylcytidine-3'-phosphate
  modified_base 8: mod_base = OTHER; note = 2'-deoxy-2'-fluorouridine-3'-phosphate
  modified_base 9: mod_base = OTHER; note = 2'-deoxy-2'-fluorocytidine-3'-phosphate
  modified_base 10: mod_base = OTHER; note = 2'-O-methyladenosine-3'-phosphate
  modified_base 11: mod_base = OTHER; note = 2'-O-methylguanosine-3'-phosphate
  modified_base 12: mod_base = OTHER; note = 2'-O-methylguanosine-3'-phosphate
  modified_base 13: mod_base = OTHER; note = 2'-O-methyladenosine-3'-phosphate
  modified_base 14: mod_base = OTHER; note = 2'-deoxy-2'-fluorocytidine-3'-phosphate
  modified_base 15: mod_base = OTHER; note = 2'-O-methyladenosine-3'-phosphate
  modified_base 16: mod_base = OTHER; note = 2'-deoxy-2'-fluorocytidine-3'-phosphate
  modified_base 17: mod_base = OTHER; note = 2'-O-methyluridine-3'-phosphate
  modified_base 18: mod_base = OTHER; note = 2'-O-methyluridine-3'-phosphate
  modified_base 19: mod_base = OTHER; note = 2'-O-methylguanosine-3'-phosphate
  modified_base 20: mod_base = OTHER; note = 2'-O-methyladenosine-3'-phosphate
  modified_base 21: mod_base = OTHER; note = 2'-O-methyladenosine-3'-phosphorothioate
  modified_base 22: mod_base = OTHER; note = 2'-O-methylcytidine-3'-phosphorothioate
  modified_base 23: mod_base = OTHER; note = 2'-O-methyluridine
tgtgcactcaggacacttgaact

SEQ ID NO: 835 - RNA, 23 nt, synthetic construct
  source 1..23: mol_type = other RNA
  modified_base 1: mod_base = OTHER; note = 2'-O-methyluridine-3'-phosphorothioate 5'-(E)-Vinylphosphonate
  modified_base 2: mod_base = OTHER; note = 2'-deoxy-2'-fluoroadenosine-3'-phosphorothioate
  modified_base 3: mod_base = OTHER; note = 2'-O-methylcytidine-3'-phosphate
  modified_base 4: mod_base = OTHER; note = 2'-O-methylcytidine-3'-phosphate
  modified_base 5: mod_base = OTHER; note = 2'-O-methyladenosine-3'-phosphate
  modified_base 6: mod_base = OTHER; note = 2'-deoxy-2'-fluorouridine-3'-phosphate
  modified_base 7: mod_base = OTHER; note = 2'-O-methylguanosine-3'-phosphate
  modified_base 8: mod_base = OTHER; note = 2'-deoxy-2'-fluorouridine-3'-phosphate
  modified_base 9: mod_base = OTHER; note = 2'-deoxy-2'-fluoroguanosine-3'-phosphate
  modified_base 10: mod_base = OTHER; note = 2'-O-methyladenosine-3'-phosphate
  modified_base 11: mod_base = OTHER; note = 2'-O-methylguanosine-3'-phosphate
  modified_base 12: mod_base = OTHER; note = 2'-O-methyluridine-3'-phosphate
  modified_base 13: mod_base = OTHER; note = 2'-O-methylcytidine-3'-phosphate
  modified_base 14: mod_base = OTHER; note = 2'-deoxy-2'-fluorouridine-3'-phosphate
  modified_base 15: mod_base = OTHER; note = 2'-O-methylguanosine-3'-phosphate
  modified_base 16: mod_base = OTHER; note = 2'-deoxy-2'-fluoroguanosine-3'-phosphate
  modified_base 17: mod_base = OTHER; note = 2'-O-methyluridine-3'-phosphate
  modified_base 18: mod_base = OTHER; note = 2'-O-methylcytidine-3'-phosphate
  modified_base 19: mod_base = OTHER; note = 2'-O-methyluridine-3'-phosphate
  modified_base 20: mod_base = OTHER; note = 2'-O-methyladenosine-3'-phosphate
  modified_base 21: mod_base = OTHER; note = 2'-O-methylguanosine-3'-phosphorothioate
  modified_base 22: mod_base = OTHER; note = 2'-O-methylguanosine-3'-phosphorothioate
  modified_base 23: mod_base = OTHER; note = 2'-O-methylguanosine
taccatgtgagtctggtctaggg

SEQ ID NO: 836 - RNA, 23 nt, synthetic construct
  source 1..23: mol_type = other RNA
  modified_base 1: mod_base = OTHER; note = 2'-O-methyluridine-3'-phosphorothioate 5'-(E)-Vinylphosphonate
  modified_base 2: mod_base = OTHER; note = 2'-deoxy-2'-fluorouridine-3'-phosphorothioate
  modified_base 3: mod_base = OTHER; note = 2'-O-methyladenosine-3'-phosphate
  modified_base 4: mod_base = OTHER; note = 2'-O-methylcytidine-3'-phosphate
  modified_base 5: mod_base = OTHER; note = 2'-O-methylcytidine-3'-phosphate
  modified_base 6: mod_base = OTHER; note = 2'-deoxy-2'-fluoroadenosine-3'-phosphate
  modified_base 7: mod_base = OTHER; note = 2'-O-methyluridine-3'-phosphate
  modified_base 8: mod_base = OTHER; note = 2'-deoxy-2'-fluoroguanosine-3'-phosphate
  modified_base 9: mod_base = OTHER; note = 2'-deoxy-2'-fluorouridine-3'-phosphate
  modified_base 10: mod_base = OTHER; note = 2'-O-methylguanosine-3'-phosphate
  modified_base 11: mod_base = OTHER; note = 2'-O-methyladenosine-3'-phosphate
  modified_base 12: mod_base = OTHER; note = 2'-O-methylguanosine-3'-phosphate
  modified_base 13: mod_base = OTHER; note = 2'-O-methyluridine-3'-phosphate
  modified_base 14: mod_base = OTHER; note = 2'-deoxy-2'-fluorocytidine-3'-phosphate
  modified_base 15: mod_base = OTHER; note = 2'-O-methyluridine-3'-phosphate
  modified_base 16: mod_base = OTHER; note = 2'-deoxy-2'-fluoroguanosine-3'-phosphate
  modified_base 17: mod_base = OTHER; note = 2'-O-methylguanosine-3'-phosphate
  modified_base 18: mod_base = OTHER; note = 2'-O-methyluridine-3'-phosphate
  modified_base 19: mod_base = OTHER; note = 2'-O-methylcytidine-3'-phosphate
  modified_base 20: mod_base = OTHER; note = 2'-O-methyluridine-3'-phosphate
  modified_base 21: mod_base = OTHER; note = 2'-O-methyladenosine-3'-phosphorothioate
  modified_base 22: mod_base = OTHER; note = 2'-O-methylguanosine-3'-phosphorothioate
  modified_base 23: mod_base = OTHER; note = 2'-O-methylguanosine
ttaccatgtgagtctggtctagg

SEQ ID NO: 837 - RNA, 23 nt, synthetic construct
  source 1..23: mol_type = other RNA
  modified_base 1: mod_base = OTHER; note = 2'-O-methyluridine-3'-phosphorothioate 5'-(E)-Vinylphosphonate
  modified_base 2: mod_base = OTHER; note = 2'-deoxy-2'-fluoroadenosine-3'-phosphorothioate
  modified_base 3: mod_base = OTHER; note = 2'-O-methyladenosine-3'-phosphate
  modified_base 4: mod_base = OTHER; note = 2'-O-methylguanosine-3'-phosphate
  modified_base 5: mod_base = OTHER; note = 2'-O-methyladenosine-3'-phosphate
  modified_base 6: mod_base = OTHER; note = 2'-deoxy-2'-fluorocytidine-3'-phosphate
  modified_base 7: mod_base = OTHER; note = 2'-O-methylguanosine-3'-phosphate
  modified_base 8: mod_base = OTHER; note = 2'-deoxy-2'-fluoroguanosine-3'-phosphate
  modified_base 9: mod_base = OTHER; note = 2'-deoxy-2'-fluoroadenosine-3'-phosphate
  modified_base 10: mod_base = OTHER; note = 2'-O-methyladenosine-3'-phosphate
  modified_base 11: mod_base = OTHER; note = 2'-O-methylguanosine-3'-phosphate
  modified_base 12: mod_base = OTHER; note = 2'-O-methylcytidine-3'-phosphate
  modified_base 13: mod_base = OTHER; note = 2'-O-methyladenosine-3'-phosphate
  modified_base 14: mod_base = OTHER; note = 2'-deoxy-2'-fluoroadenosine-3'-phosphate
  modified_base 15: mod_base = OTHER; note = 2'-O-methyladenosine-3'-phosphate
  modified_base 16: mod_base = OTHER; note = 2'-deoxy-2'-fluorocytidine-3'-phosphate
  modified_base 17: mod_base = OTHER; note = 2'-O-methyluridine-3'-phosphate
  modified_base 18: mod_base = OTHER; note = 2'-O-methyluridine-3'-phosphate
  modified_base 19: mod_base = OTHER; note = 2'-O-methylguanosine-3'-phosphate
  modified_base 20: mod_base = OTHER; note = 2'-O-methyluridine-3'-phosphate
  modified_base 21: mod_base = OTHER; note = 2'-O-methyluridine-3'-phosphorothioate
  modified_base 22: mod_base = OTHER; note = 2'-O-methylguanosine-3'-phosphorothioate
  modified_base 23: mod_base = OTHER; note = 2'-O-methyladenosine
taagacggaagcaaacttgttga

SEQ ID NO: 838 - RNA, 23 nt, synthetic construct
  source 1..23: mol_type = other RNA
  modified_base 1: mod_base = OTHER; note = 2'-O-methyluridine-3'-phosphorothioate 5'-(E)-Vinylphosphonate
  modified_base 2: mod_base = OTHER; note = 2'-deoxy-2'-fluorocytidine-3'-phosphorothioate
  modified_base 3: mod_base = OTHER; note = 2'-O-methylcytidine-3'-phosphate
  modified_base 4: mod_base = OTHER; note = 2'-O-methylguanosine-3'-phosphate
  modified_base 5: mod_base = OTHER; note = 2'-O-methyladenosine-3'-phosphate
  modified_base 6: mod_base = OTHER; note = 2'-deoxy-2'-fluoroadenosine-3'-phosphate
  modified_base 7: mod_base = OTHER; note = 2'-O-methylguanosine-3'-phosphate
  modified_base 8: mod_base = OTHER; note = 2'-deoxy-2'-fluoroadenosine-3'-phosphate
  modified_base 9: mod_base = OTHER; note = 2'-deoxy-2'-fluorocytidine-3'-phosphate
  modified_base 10: mod_base = OTHER; note = 2'-O-methylguanosine-3'-phosphate
  modified_base 11: mod_base = OTHER; note = 2'-O-methylguanosine-3'-phosphate
  modified_base 12: mod_base = OTHER; note = 2'-O-methyladenosine-3'-phosphate
  modified_base 13: mod_base = OTHER; note = 2'-O-methyladenosine-3'-phosphate
  modified_base 14: mod_base = OTHER; note = 2'-deoxy-2'-fluoroguanosine-3'-phosphate
  modified_base 15: mod_base = OTHER; note = 2'-O-methylcytidine-3'-phosphate
  modified_base 16: mod_base = OTHER; note = 2'-deoxy-2'-fluoroadenosine-3'-phosphate
  modified_base 17: mod_base = OTHER; note = 2'-O-methyladenosine-3'-phosphate
  modified_base 18: mod_base = OTHER; note = 2'-O-methyladenosine-3'-phosphate
  modified_base 19: mod_base = OTHER; note = 2'-O-methylcytidine-3'-phosphate
  modified_base 20: mod_base = OTHER; note = 2'-O-methyluridine-3'-phosphate
  modified_base 21: mod_base = OTHER; note = 2'-O-methyluridine-3'-phosphorothioate
  modified_base 22: mod_base = OTHER; note = 2'-O-methylguanosine-3'-phosphorothioate
  modified_base 23: mod_base = OTHER; note = 2'-O-methyluridine
tccgaagacggaagcaaacttgt

SEQ ID NO: 839 - RNA, 23 nt, synthetic construct
  source 1..23: mol_type = other RNA
  modified_base 1: mod_base = OTHER; note = 2'-O-methyluridine-3'-phosphorothioate 5'-(E)-Vinylphosphonate
  modified_base 2: mod_base = OTHER; note = 2'-deoxy-2'-fluorouridine-3'-phosphorothioate
  modified_base 3: mod_base = OTHER; note = 2'-O-methylcytidine-3'-phosphate
  modified_base 4: mod_base = OTHER; note = 2'-O-methylcytidine-3'-phosphate
  modified_base 5: mod_base = OTHER; note = 2'-O-methylguanosine-3'-phosphate
  modified_base 6: mod_base = OTHER; note = 2'-deoxy-2'-fluoroadenosine-3'-phosphate
  modified_base 7: mod_base = OTHER; note = 2'-O-methyladenosine-3'-phosphate
  modified_base 8: mod_base = OTHER; note = 2'-deoxy-2'-fluoroguanosine-3'-phosphate
  modified_base 9: mod_base = OTHER; note = 2'-deoxy-2'-fluoroadenosine-3'-phosphate
  modified_base 10: mod_base = OTHER; note = 2'-O-methylcytidine-3'-phosphate
  modified_base 11: mod_base = OTHER; note = 2'-O-methylguanosine-3'-phosphate
  modified_base 12: mod_base = OTHER; note = 2'-O-methylguanosine-3'-phosphate
  modified_base 13: mod_base = OTHER; note = 2'-O-methyladenosine-3'-phosphate
  modified_base 14: mod_base = OTHER; note = 2'-deoxy-2'-fluoroadenosine-3'-phosphate
  modified_base 15: mod_base = OTHER; note = 2'-O-methylguanosine-3'-phosphate
  modified_base 16: mod_base = OTHER; note = 2'-deoxy-2'-fluorocytidine-3'-phosphate
  modified_base 17: mod_base = OTHER; note = 2'-O-methyladenosine-3'-phosphate
  modified_base 18: mod_base = OTHER; note = 2'-O-methyladenosine-3'-phosphate
  modified_base 19: mod_base = OTHER; note = 2'-O-methyladenosine-3'-phosphate
  modified_base 20: mod_base = OTHER; note = 2'-O-methylcytidine-3'-phosphate
  modified_base 21: mod_base = OTHER; note = 2'-O-methyluridine-3'-phosphorothioate
  modified_base 22: mod_base = OTHER; note = 2'-O-methyluridine-3'-phosphorothioate
  modified_base 23: mod_base = OTHER; note = 2'-O-methylguanosine
ttccgaagacggaagcaaacttg

SEQ ID NO: 840 - RNA, 23 nt, synthetic construct
  source 1..23: mol_type = other RNA
  modified_base 1: mod_base = OTHER; note = 2'-O-methyluridine-3'-phosphorothioate 5'-(E)-Vinylphosphonate
  modified_base 2: mod_base = OTHER; note = 2'-deoxy-2'-fluorouridine-3'-phosphorothioate
  modified_base 3: mod_base = OTHER; note = 2'-O-methyluridine-3'-phosphate
  modified_base 4: mod_base = OTHER; note = 2'-O-methylcytidine-3'-phosphate
  modified_base 5: mod_base = OTHER; note = 2'-O-methylcytidine-3'-phosphate
  modified_base 6: mod_base = OTHER; note = 2'-deoxy-2'-fluoroguanosine-3'-phosphate
  modified_base 7: mod_base = OTHER; note = 2'-O-methyladenosine-3'-phosphate
  modified_base 8: mod_base = OTHER; note = 2'-deoxy-2'-fluoroadenosine-3'-phosphate
  modified_base 9: mod_base = OTHER; note = 2'-deoxy-2'-fluoroguanosine-3'-phosphate
  modified_base 10: mod_base = OTHER; note = 2'-O-methyladenosine-3'-phosphate
  modified_base 11: mod_base = OTHER; note = 2'-O-methylcytidine-3'-phosphate
  modified_base 12: mod_base = OTHER; note = 2'-O-methylguanosine-3'-phosphate
  modified_base 13: mod_base = OTHER; note = 2'-O-methylguanosine-3'-phosphate
  modified_base 14: mod_base = OTHER; note = 2'-deoxy-2'-fluoroadenosine-3'-phosphate
  modified_base 15: mod_base = OTHER; note = 2'-O-methyladenosine-3'-phosphate
  modified_base 16: mod_base = OTHER; note = 2'-deoxy-2'-fluoroguanosine-3'-phosphate
  modified_base 17: mod_base = OTHER; note = 2'-O-methylcytidine-3'-phosphate
  modified_base 18: mod_base = OTHER; note = 2'-O-methyladenosine-3'-phosphate
  modified_base 19: mod_base = OTHER; note = 2'-O-methyladenosine-3'-phosphate
  modified_base 20: mod_base = OTHER; note = 2'-O-methyladenosine-3'-phosphate
  modified_base 21: mod_base = OTHER; note = 2'-O-methylcytidine-3'-phosphorothioate
  modified_base 22: mod_base = OTHER; note = 2'-O-methyluridine-3'-phosphorothioate
  modified_base 23: mod_base = OTHER; note = 2'-O-methyluridine
tttccgaagacggaagcaaactt

SEQ ID NO: 841 - RNA, 23 nt, synthetic construct
  source 1..23: mol_type = other RNA
  modified_base 1: mod_base = OTHER; note = 2'-O-methyluridine-3'-phosphorothioate 5'-(E)-Vinylphosphonate
  modified_base 2: mod_base = OTHER; note = 2'-deoxy-2'-fluoroguanosine-3'-phosphorothioate
  modified_base 3: mod_base = OTHER; note = 2'-O-methyluridine-3'-phosphate
  modified_base 4: mod_base = OTHER; note = 2'-O-methyluridine-3'-phosphate
  modified_base 5: mod_base = OTHER; note = 2'-O-methylcytidine-3'-phosphate
  modified_base 6: mod_base = OTHER; note = 2'-deoxy-2'-fluorocytidine-3'-phosphate
  modified_base 7: mod_base = OTHER; note = 2'-O-methylguanosine-3'-phosphate
  modified_base 8: mod_base = OTHER; note = 2'-deoxy-2'-fluoroadenosine-3'-phosphate
  modified_base 9: mod_base = OTHER; note = 2'-deoxy-2'-fluoroadenosine-3'-phosphate
  modified_base 10: mod_base = OTHER; note = 2'-O-methylguanosine-3'-phosphate
  modified_base 11: mod_base = OTHER; note = 2'-O-methyladenosine-3'-phosphate
  modified_base 12: mod_base = OTHER; note = 2'-O-methylcytidine-3'-phosphate
  modified_base 13: mod_base = OTHER; note = 2'-O-methylguanosine-3'-phosphate
  modified_base 14: mod_base = OTHER; note = 2'-deoxy-2'-fluoroguanosine-3'-phosphate
  modified_base 15: mod_base = OTHER; note = 2'-O-methyladenosine-3'-phosphate
  modified_base 16: mod_base = OTHER; note = 2'-deoxy-2'-fluoroadenosine-3'-phosphate
  modified_base 17: mod_base = OTHER; note = 2'-O-methylguanosine-3'-phosphate
  modified_base 18: mod_base = OTHER; note = 2'-O-methylcytidine-3'-phosphate
  modified_base 19: mod_base = OTHER; note = 2'-O-methyladenosine-3'-phosphate
  modified_base 20: mod_base = OTHER; note = 2'-O-methyladenosine-3'-phosphate
  modified_base 21: mod_base = OTHER; note = 2'-O-methyladenosine-3'-phosphorothioate
  modified_base 22: mod_base = OTHER; note = 2'-O-methylcytidine-3'-phosphorothioate
  modified_base 23: mod_base = OTHER; note = 2'-O-methyluridine
tgttccgaagacggaagcaaact

SEQ ID NO: 842 - RNA, 23 nt, synthetic construct
  source 1..23: mol_type = other RNA
  modified_base 1: mod_base = OTHER; note = 2'-O-methyluridine-3'-phosphorothioate 5'-(E)-Vinylphosphonate
  modified_base 2: mod_base = OTHER; note = 2'-deoxy-2'-fluorocytidine-3'-phosphorothioate
  modified_base 3: mod_base = OTHER; note = 2'-O-methylguanosine-3'-phosphate
  modified_base 4: mod_base = OTHER; note = 2'-O-methyluridine-3'-phosphate
  modified_base 5: mod_base = OTHER; note = 2'-O-methyluridine-3'-phosphate
  modified_base 6: mod_base = OTHER; note = 2'-deoxy-2'-fluorocytidine-3'-phosphate
  modified_base 7: mod_base = OTHER; note = 2'-O-methylcytidine-3'-phosphate
  modified_base 8: mod_base = OTHER; note = 2'-deoxy-2'-fluoroguanosine-3'-phosphate
  modified_base 9: mod_base = OTHER; note = 2'-deoxy-2'-fluoroadenosine-3'-phosphate
  modified_base 10: mod_base = OTHER; note = 2'-O-methyladenosine-3'-phosphate
  modified_base 11: mod_base = OTHER; note = 2'-O-methylguanosine-3'-phosphate
  modified_base 12: mod_base = OTHER; note = 2'-O-methyladenosine-3'-phosphate
  modified_base 13: mod_base = OTHER; note = 2'-O-methylcytidine-3'-phosphate
  modified_base 14: mod_base = OTHER; note = 2'-deoxy-2'-fluoroguanosine-3'-phosphate
  modified_base 15: mod_base = OTHER; note = 2'-O-methylguanosine-3'-phosphate
  modified_base 16: mod_base = OTHER; note = 2'-deoxy-2'-fluoroadenosine-3'-phosphate
  modified_base 17: mod_base = OTHER; note = 2'-O-methyladenosine-3'-phosphate
  modified_base 18: mod_base = OTHER; note = 2'-O-methylguanosine-3'-phosphate
  modified_base 19: mod_base = OTHER; note = 2'-O-methylcytidine-3'-phosphate
  modified_base 20: mod_base = OTHER; note = 2'-O-methyladenosine-3'-phosphate
  modified_base 21: mod_base = OTHER; note = 2'-O-methyladenosine-3'-phosphorothioate
  modified_base 22: mod_base = OTHER; note = 2'-O-methyladenosine-3'-phosphorothioate
  modified_base 23: mod_base = OTHER; note = 2'-O-methylcytidine
tcgttccgaagacggaagcaaac

SEQ ID NO: 843 - RNA, 23 nt, synthetic construct
  source 1..23: mol_type = other RNA
  modified_base 1: mod_base = OTHER; note = 2'-O-methyluridine-3'-phosphorothioate 5'-(E)-Vinylphosphonate
  modified_base 2: mod_base = OTHER; note = 2'-deoxy-2'-fluorouridine-3'-phosphorothioate
  modified_base 3: mod_base = OTHER; note = 2'-O-methylcytidine-3'-phosphate
  modified_base 4: mod_base = OTHER; note = 2'-O-methylguanosine-3'-phosphate
  modified_base 5: mod_base = OTHER; note = 2'-O-methyluridine-3'-phosphate
  modified_base 6: mod_base = OTHER; note = 2'-deoxy-2'-fluorouridine-3'-phosphate
  modified_base 7: mod_base = OTHER; note = 2'-O-methylcytidine-3'-phosphate
  modified_base 8: mod_base = OTHER; note = 2'-deoxy-2'-fluorocytidine-3'-phosphate
  modified_base 9: mod_base = OTHER; note = 2'-deoxy-2'-fluoroguanosine-3'-phosphate
  modified_base 10: mod_base = OTHER; note = 2'-O-methyladenosine-3'-phosphate
  modified_base 11: mod_base = OTHER; note = 2'-O-methyladenosine-3'-phosphate
  modified_base 12: mod_base = OTHER; note = 2'-O-methylguanosine-3'-phosphate
  modified_base 13: mod_base = OTHER; note = 2'-O-methyladenosine-3'-phosphate
  modified_base 14: mod_base = OTHER; note = 2'-deoxy-2'-fluorocytidine-3'-phosphate
  modified_base 15: mod_base = OTHER; note = 2'-O-methylguanosine-3'-phosphate
  modified_base 16: mod_base = OTHER; note = 2'-deoxy-2'-fluoroguanosine-3'-phosphate
  modified_base 17: mod_base = OTHER; note = 2'-O-methyladenosine-3'-phosphate
  modified_base 18: mod_base = OTHER; note = 2'-O-methyladenosine-3'-phosphate
  modified_base 19: mod_base = OTHER; note = 2'-O-methylguanosine-3'-phosphate
  modified_base 20: mod_base = OTHER; note = 2'-O-methylcytidine-3'-phosphate
  modified_base 21: mod_base = OTHER; note = 2'-O-methyladenosine-3'-phosphorothioate
  modified_base 22: mod_base = OTHER; note = 2'-O-methyladenosine-3'-phosphorothioate
  modified_base 23: mod_base = OTHER; note = 2'-O-methyladenosine
ttcgttccgaagacggaagcaaa

SEQ ID NO: 844 - RNA, 23 nt, synthetic construct
  source 1..23: mol_type = other RNA
  modified_base 1: mod_base = OTHER; note = 2'-O-methyluridine-3'-phosphorothioate 5'-(E)-Vinylphosphonate
  modified_base 2: mod_base = OTHER; note = 2'-deoxy-2'-fluoroadenosine-3'-phosphorothioate
  modified_base 3: mod_base = OTHER; note = 2'-O-methyluridine-3'-phosphate
  modified_base 4: mod_base = OTHER; note = 2'-O-methylcytidine-3'-phosphate
  modified_base 5: mod_base = OTHER; note = 2'-O-methylguanosine-3'-phosphate
  modified_base 6: mod_base = OTHER; note = 2'-deoxy-2'-fluorouridine-3'-phosphate
  modified_base 7: mod_base = OTHER; note = 2'-O-methyluridine-3'-phosphate
  modified_base 8: mod_base = OTHER; note = 2'-deoxy-2'-fluorocytidine-3'-phosphate
  modified_base 9: mod_base = OTHER; note = 2'-deoxy-2'-fluorocytidine-3'-phosphate
  modified_base 10: mod_base = OTHER; note = 2'-O-methylguanosine-3'-phosphate
  modified_base 11: mod_base = OTHER; note = 2'-O-methyladenosine-3'-phosphate
  modified_base 12: mod_base = OTHER; note = 2'-O-methyladenosine-3'-phosphate
  modified_base 13: mod_base = OTHER; note = 2'-O-methylguanosine-3'-phosphate
  modified_base 14: mod_base = OTHER; note = 2'-deoxy-2'-fluoroadenosine-3'-phosphate
  modified_base 15: mod_base = OTHER; note = 2'-O-methylcytidine-3'-phosphate
  modified_base 16: mod_base = OTHER; note = 2'-deoxy-2'-fluoroguanosine-3'-phosphate
  modified_base 17: mod_base = OTHER; note = 2'-O-methylguanosine-3'-phosphate
  modified_base 18: mod_base = OTHER; note = 2'-O-methyladenosine-3'-phosphate
  modified_base 19: mod_base = OTHER; note = 2'-O-methyladenosine-3'-phosphate
  modified_base 20: mod_base = OTHER; note = 2'-O-methylguanosine-3'-phosphate
  modified_base 21: mod_base = OTHER; note = 2'-O-methylcytidine-3'-phosphorothioate
  modified_base 22: mod_base = OTHER; note = 2'-O-methyladenosine-3'-phosphorothioate
  modified_base 23: mod_base = OTHER; note = 2'-O-methyladenosine
tatcgttccgaagacggaagcaa

SEQ ID NO: 845 - RNA, 23 nt, synthetic construct
  source 1..23: mol_type = other RNA
  modified_base 1: mod_base = OTHER; note = 2'-O-methyluridine-3'-phosphorothioate 5'-(E)-Vinylphosphonate
  modified_base 2: mod_base = OTHER; note = 2'-deoxy-2'-fluorocytidine-3'-phosphorothioate
  modified_base 3: mod_base = OTHER; note = 2'-O-methyladenosine-3'-phosphate
  modified_base 4: mod_base = OTHER; note = 2'-O-methyluridine-3'-phosphate
  modified_base 5: mod_base = OTHER; note = 2'-O-methylcytidine-3'-phosphate
  modified_base 6: mod_base = OTHER; note = 2'-deoxy-2'-fluoroguanosine-3'-phosphate
  modified_base 7: mod_base = OTHER; note = 2'-O-methyluridine-3'-phosphate
  modified_base 8: mod_base = OTHER; note = 2'-deoxy-2'-fluorouridine-3'-phosphate
  modified_base 9: mod_base = OTHER; note = 2'-deoxy-2'-fluorocytidine-3'-phosphate
  modified_base 10: mod_base = OTHER; note = 2'-O-methylcytidine-3'-phosphate
  modified_base 11: mod_base = OTHER; note = 2'-O-methylguanosine-3'-phosphate
  modified_base 12: mod_base = OTHER; note = 2'-O-methyladenosine-3'-phosphate
  modified_base 13: mod_base = OTHER; note = 2'-O-methyladenosine-3'-phosphate
  modified_base 14: mod_base = OTHER; note = 2'-deoxy-2'-fluoroguanosine-3'-phosphate
  modified_base 15: mod_base = OTHER; note = 2'-O-methyladenosine-3'-phosphate
  modified_base 16: mod_base = OTHER; note = 2'-deoxy-2'-fluorocytidine-3'-phosphate
  modified_base 17: mod_base = OTHER; note = 2'-O-methylguanosine-3'-phosphate
  modified_base 18: mod_base = OTHER; note = 2'-O-methylguanosine-3'-phosphate
  modified_base 19: mod_base = OTHER; note = 2'-O-methyladenosine-3'-phosphate
  modified_base 20: mod_base = OTHER; note = 2'-O-methyladenosine-3'-phosphate
  modified_base 21: mod_base = OTHER; note = 2'-O-methylguanosine-3'-phosphorothioate
  modified_base 22: mod_base = OTHER; note = 2'-O-methylcytidine-3'-phosphorothioate
  modified_base 23: mod_base = OTHER; note = 2'-O-methyladenosine
tcatcgttccgaagacggaagca

SEQ ID NO: 846 - RNA, 23 nt, synthetic construct
  source 1..23: mol_type = other RNA
  modified_base 1: mod_base = OTHER; note = 2'-O-methyluridine-3'-phosphorothioate 5'-(E)-Vinylphosphonate
  modified_base 2: mod_base = OTHER; note = 2'-deoxy-2'-fluoroadenosine-3'-phosphorothioate
  modified_base 3: mod_base = OTHER; note = 2'-O-methyluridine-3'-phosphate
  modified_base 4: mod_base = OTHER; note = 2'-O-methyladenosine-3'-phosphate
  modified_base 5: mod_base = OTHER; note = 2'-O-methyluridine-3'-phosphate
  modified_base 6: mod_base = OTHER; note = 2'-deoxy-2'-fluorocytidine-3'-phosphate
  modified_base 7: mod_base = OTHER; note = 2'-O-methyladenosine-3'-phosphate
  modified_base 8: mod_base = OTHER; note = 2'-deoxy-2'-fluoroadenosine-3'-phosphate
  modified_base 9: mod_base = OTHER; note = 2'-deoxy-2'-fluoroadenosine-3'-phosphate
  modified_base 10: mod_base = OTHER; note = 2'-O-methyladenosine-3'-phosphate
  modified_base 11: mod_base = OTHER; note = 2'-O-methyladenosine-3'-phosphate
  modified_base 12: mod_base = OTHER; note = 2'-O-methylguanosine-3'-phosphate
  modified_base 13: mod_base = OTHER; note = 2'-O-methylcytidine-3'-phosphate
  modified_base 14: mod_base = OTHER; note = 2'-deoxy-2'-fluorocytidine-3'-phosphate
  modified_base 15: mod_base = OTHER; note = 2'-O-methyladenosine-3'-phosphate
  modified_base 16: mod_base = OTHER; note = 2'-deoxy-2'-fluoroadenosine-3'-phosphate
  modified_base 17: mod_base = OTHER; note = 2'-O-methyladenosine-3'-phosphate
  modified_base 18: mod_base = OTHER; note = 2'-O-methyladenosine-3'-phosphate
  modified_base 19: mod_base = OTHER; note = 2'-O-methylcytidine-3'-phosphate
  modified_base 20: mod_base = OTHER; note = 2'-O-methyladenosine-3'-phosphate
  modified_base 21: mod_base = OTHER; note = 2'-O-methyladenosine-3'-phosphorothioate
  modified_base 22: mod_base = OTHER; note = 2'-O-methyladenosine-3'-phosphorothioate
  modified_base 23: mod_base = OTHER; note = 2'-O-methylguanosine
tatatcaaaaagccaaaacaaag

SEQ ID NO: 847 - RNA, 23 nt, synthetic construct
  source 1..23: mol_type = other RNA
ctggtggtctggaataatcagaa

SEQ ID NO: 848 - RNA, 23 nt, synthetic construct
  source 1..23: mol_type = other RNA
ggtggtctggaataatcagaata

SEQ ID NO: 849 - RNA, 23 nt, synthetic construct
  source 1..23: mol_type = other RNA
gtggtctggaataatcagaataa

SEQ ID NO: 850 - RNA, 23 nt, synthetic construct
  source 1..23: mol_type = other RNA
ggaataatcagaataaaaaccct

SEQ ID NO: 851 - RNA, 23 nt, synthetic construct
  source 1..23: mol_type = other RNA
gaataatcagaataaaaaccctc

SEQ ID NO: 852 - RNA, 23 nt, synthetic construct
  source 1..23: mol_type = other RNA
aataatcagaataaaaaccctcc

SEQ ID NO: 853 - RNA, 23 nt, synthetic construct
  source 1..23: mol_type = other RNA
ataatcagaataaaaaccctccg

SEQ ID NO: 854 - RNA, 23 nt, synthetic construct
  source 1..23: mol_type = other RNA
gactgcagaaaacaagctaagta

SEQ ID NO: 855 - RNA, 23 nt, synthetic construct
  source 1..23: mol_type = other RNA
gcagaaaacaagctaagtaatcg

SEQ ID NO: 856 - RNA, 23 nt, synthetic construct
  source 1..23: mol_type = other RNA
gaaaacaagctaagtaatcgttt

SEQ ID NO: 857 - RNA, 23 nt, synthetic construct
  source 1..23: mol_type = other RNA
aaaacaagctaagtaatcgtttc

SEQ ID NO: 858 - RNA, 23 nt, synthetic construct
  source 1..23: mol_type = other RNA
aaacaagctaagtaatcgtttct

SEQ ID NO: 859 - RNA, 23 nt, synthetic construct
  source 1..23: mol_type = other RNA
aacaagctaagtaatcgtttctt

SEQ ID NO: 860 - RNA, 23 nt, synthetic construct
  source 1..23: mol_type = other RNA
acaagctaagtaatcgtttcttc

SEQ ID NO: 861 - RNA, 23 nt, synthetic construct
  source 1..23: mol_type = other RNA
caagctaagtaatcgtttcttcc

SEQ ID NO: 862 - RNA, 23 nt, synthetic construct
  source 1..23: mol_type = other RNA
aagctaagtaatcgtttcttccc

SEQ ID NO: 863 - RNA, 23 nt, synthetic construct
  source 1..23: mol_type = other RNA
agctaagtaatcgtttcttccct

SEQ ID NO: 864 - RNA, 23 nt, synthetic construct
  source 1..23: mol_type = other RNA
agtaatcgtttcttcccttacga

SEQ ID NO: 865 - RNA, 23 nt, synthetic construct
  source 1..23: mol_type = other RNA
gtaatcgtttcttcccttacgac

SEQ ID NO: 866 - RNA, 23 nt, synthetic construct
  source 1..23: mol_type = other RNA
tcccttacgacgaaatcgagaca

SEQ ID NO: 867 - RNA, 23 nt, synthetic construct
  source 1..23: mol_type = other RNA
tgacgagctgcagtttggttatg

SEQ ID NO: 868 - RNA, 23 nt, synthetic construct
  source 1..23: mol_type = other RNA
acgagctgcagtttggttatgag

SEQ ID NO: 869 - RNA, 23 nt, synthetic construct
  source 1..23: mol_type = other RNA
gatactcacatgaactgtgaaga

SEQ ID NO: 870 - RNA, 23 nt, synthetic construct
  source 1..23: mol_type = other RNA
cacatgaactgtgaagatattgc

SEQ ID NO: 871 - RNA, 23 nt, synthetic construct
  source 1..23: mol_type = other RNA
acatgaactgtgaagatattgcc

SEQ ID NO: 872 - RNA, 23 nt, synthetic construct
  source 1..23: mol_type = other RNA
catgaactgtgaagatattgcca

SEQ ID NO: 873 - RNA, 23 nt, synthetic construct
  source 1..23: mol_type = other RNA
aactgtgaagatattgccatgaa

SEQ ID NO: 874 - RNA, 23 nt, synthetic construct
  source 1..23: mol_type = other RNA
ctgtgaagatattgccatgaatt

SEQ ID NO: 875 - RNA, 23 nt, synthetic construct
  source 1..23: mol_type = other RNA
agggaaagctgtcatcaaggtaa

SEQ ID NO: 876 - RNA, 23 nt, synthetic construct
  source 1..23: mol_type = other RNA
gggaaagctgtcatcaaggtaac

SEQ ID NO: 877 - RNA, 23 nt, synthetic construct
  source 1..23: mol_type = other RNA
ggaaagctgtcatcaaggtaacc

SEQ ID NO: 878 - RNA, 23 nt, synthetic construct
  source 1..23: mol_type = other RNA
gaaagctgtcatcaaggtaaccc

SEQ ID NO: 879 - RNA, 23 nt, synthetic construct
  source 1..23: mol_type = other RNA
agttcaagtgtcctgagtgcacg

SEQ ID NO: 880 - RNA, 23 nt, synthetic construct
  source 1..23: mol_type = other RNA
ccctagaccagactcacatggta

SEQ ID NO: 881 - RNA, 23 nt, synthetic construct
  source 1..23: mol_type = other RNA
cctagaccagactcacatggtag

SEQ ID NO: 882 - RNA, 23 nt, synthetic construct
  source 1..23: mol_type = other RNA
tcaacaagtttgcttccgtcttc

SEQ ID NO: 883 - RNA, 23 nt, synthetic construct
  source 1..23: mol_type = other RNA
acaagtttgcttccgtcttcgga

SEQ ID NO: 884 - RNA, 23 nt, synthetic construct
  source 1..23: mol_type = other RNA
caagtttgcttccgtcttcggaa

SEQ ID NO: 885 - RNA, 23 nt, synthetic construct
  source 1..23: mol_type = other RNA
aagtttgcttccgtcttcggaac

SEQ ID NO: 886 - RNA, 23 nt, synthetic construct
  source 1..23: mol_type = other RNA
agtttgcttccgtcttcggaacg

SEQ ID NO: 887 - RNA, 23 nt, synthetic construct
  source 1..23: mol_type = other RNA
gtttgcttccgtcttcggaacga

SEQ ID NO: 888 - RNA, 23 nt, synthetic construct
  source 1..23: mol_type = other RNA
tttgcttccgtcttcggaacgat

SEQ ID NO: 889 - RNA, 23 nt, synthetic construct
  source 1..23: mol_type = other RNA
ttgcttccgtcttcggaacgatg

SEQ ID NO: 890 - RNA, 23 nt, synthetic construct
  source 1..23: mol_type = other RNA
tgcttccgtcttcggaacgatgc

SEQ ID NO: 891 - RNA, 23 nt, synthetic construct
  source 1..23: mol_type = other RNA
ctttgttttggctttttgatatg

SEQ ID NO: 892 - RNA, 21 nt, synthetic construct
  source 1..21: mol_type = other RNA
accgggtatgaagctaaaata

SEQ ID NO: 893 - RNA, 21 nt, synthetic construct
  source 1..21: mol_type = other RNA
tctcctgtattgaaagcgtta

SEQ ID NO: 894 - RNA, 21 nt, synthetic construct
  source 1..21: mol_type = other RNA
ctgctgattggtttcagtcta

SEQ ID NO: 895 - RNA, 21 nt, synthetic construct
  source 1..21: mol_type = other RNA
cctccagaaacaactcgaaca

SEQ ID NO: 896 - RNA, 21 nt, synthetic construct
  source 1..21: mol_type = other RNA
aagtgcatactcacaactgga

SEQ ID NO: 897 - RNA, 21 nt, synthetic construct
  source 1..21: mol_type = other RNA
cttggaatctagtcgctttca

SEQ ID NO: 898 - RNA, 21 nt, synthetic construct
  source 1..21: mol_type = other RNA
ttggaatctagtcgctttcga

SEQ ID NO: 899 - RNA, 21 nt, synthetic construct
  source 1..21: mol_type = other RNA
tggaatctagtcgctttcgta

SEQ ID NO: 900 - RNA, 21 nt, synthetic construct
  source 1..21: mol_type = other RNA
ggaatctagtcgctttcgtta

SEQ ID NO: 901 - RNA, 21 nt, synthetic construct
  source 1..21: mol_type = other RNA
gaatctagtcgctttcgttaa

SEQ ID NO: 902 - RNA, 21 nt, synthetic construct
  source 1..21: mol_type = other RNA
gaccgctacatcttagtagaa

SEQ ID NO: 903 - RNA, 21 nt, synthetic construct
  source 1..21: mol_type = other RNA
gggcaaagaaggtactcgcaa

SEQ ID NO: 904 - RNA, 21 nt, synthetic construct
  source 1..21: mol_type = other RNA
aaagaaggtactcgcatgaaa

SEQ ID NO: 905 - RNA, 21 nt, synthetic construct
  source 1..21: mol_type = other RNA
tcgggcaagttctatcataca

SEQ ID NO: 906 - RNA, 21 nt, synthetic construct
  source 1..21: mol_type = other RNA
atgaggctcaacaaacagtta

SEQ ID NO: 907 - RNA, 21 nt, synthetic construct
  source 1..21: mol_type = other RNA
cccacacgatcttctataata

SEQ ID NO: 908 - RNA, 21 nt, synthetic construct
  source 1..21: mol_type = other RNA
ccacacgatcttctataatga

SEQ ID NO: 909 - RNA, 21 nt, synthetic construct
  source 1..21: mol_type = other RNA
cacgatcttctataatgagta

SEQ ID NO: 910 - RNA, 21 nt, synthetic construct
  source 1..21: mol_type = other RNA
tcgtgaactagatcgaagcaa

SEQ ID NO: 911 - RNA, 21 nt, synthetic construct
  source 1..21: mol_type = other RNA
tgctgcttaatccgatcagta

SEQ ID NO: 912 - RNA, 21 nt, synthetic construct
  source 1..21: mol_type = other RNA
atccgatcagtgtctttatga

SEQ ID NO: 913 - RNA, 21 nt, synthetic construct
  source 1..21: mol_type = other RNA
tccgatcagtgtctttatgaa

SEQ ID NO: 914 - RNA, 21 nt, synthetic construct
  source 1..21: mol_type = other RNA
gaactttttcctcaggaacga

SEQ ID NO: 915 - RNA, 21 nt, synthetic construct
  source 1..21: mol_type = other RNA
aactttttcctcaggaacgaa

SEQ ID NO: 916 - RNA, 21 nt, synthetic construct
  source 1..21: mol_type = other RNA
gagattcagttcttcaatgga

SEQ ID NO: 917 - RNA, 21 nt, synthetic construct
  source 1..21: mol_type = other RNA
cattgctctgaactacaccta

SEQ ID NO: 918 - RNA, 21 nt, synthetic construct
  source 1..21: mol_type = other RNA
attgctctgaactacacctta

SEQ ID NO: 919 - RNA, 21 nt, synthetic construct
  source 1..21: mol_type = other RNA
ctgaactacaccttctaccaa

SEQ ID NO: 920 - RNA, 21 nt, synthetic construct
  source 1..21: mol_type = other RNA
tgctacttcgctccttgcaga

SEQ ID NO: 921 - RNA, 21 nt, synthetic construct
  source 1..21: mol_type = other RNA
tgcagaaccgttgtcttgtta

SEQ ID NO: 922 - RNA, 21 nt, synthetic construct
  source 1..21: mol_type = other RNA
ttgttcctggctactattcta

SEQ ID NO: 923 - RNA, 21 nt, synthetic construct
  source 1..21: mol_type = other RNA
gttcctggctactattctaca

SEQ ID NO: 924 - RNA, 21 nt, synthetic construct
  source 1..21: mol_type = other RNA
ctctggacagttgctgattaa

SEQ ID NO: 925 - RNA, 21 nt, synthetic construct
  source 1..21: mol_type = other RNA
tctggacagttgctgattata

SEQ ID NO: 926 - RNA, 21 nt, synthetic construct
  source 1..21: mol_type = other RNA
ctggacagttgctgattatga

SEQ ID NO: 927 - RNA, 21 nt, synthetic construct
  source 1..21: mol_type = other RNA
gtctcgccttttccttacgga

SEQ ID NO: 928 - RNA, 21 nt, synthetic construct
  source 1..21: mol_type = other RNA
tctcgccttttccttacggaa

SEQ ID NO: 929 - RNA, 21 nt, synthetic construct
  source 1..21: mol_type = other RNA
tcgccttttccttacggatta

SEQ ID NO: 930 - RNA, 21 nt, synthetic construct
  source 1..21: mol_type = other RNA
cgccttttccttacggattta

SEQ ID NO: 931 - RNA, 21 nt, synthetic construct
  source 1..21: mol_type = other RNA
gccttttccttacggatttta

SEQ ID NO: 932 - RNA, 21 nt, synthetic construct
  source 1..21: mol_type = other RNA
aaccataatttggagctatca

SEQ ID NO: 933 - RNA, 21 nt, synthetic construct
  source 1..21: mol_type = other RNA
agcagtttacctgtcaatgca

SEQ ID NO: 934 - RNA, 21 nt, synthetic construct
  source 1..21: mol_type = other RNA
cagtttacctgtcaatgccta

SEQ ID NO: 935 - RNA, 21 nt, synthetic construct
  source 1..21: mol_type = other RNA
ctctaatgtcattcacattga

SEQ ID NO: 936 - RNA, 23 nt, synthetic construct
  source 1..23: mol_type = other RNA
tattttagcttcatacccggtgg

SEQ ID NO: 937 - RNA, 23 nt, synthetic construct
  source 1..23: mol_type = other RNA
taacgctttcaatacaggagagg

SEQ ID NO: 938 - RNA, 23 nt, synthetic construct
  source 1..23: mol_type = other RNA
tagactgaaaccaatcagcagca

SEQ ID NO: 939 - RNA, 23 nt, synthetic construct
  source 1..23: mol_type = other RNA
tgttcgagttgtttctggaggcc

SEQ ID NO: 940 - RNA, 23 nt, synthetic construct
  source 1..23: mol_type = other RNA
tccagttgtgagtatgcactttc

SEQ ID NO: 941 - RNA, 23 nt, synthetic construct
  source 1..23: mol_type = other RNA
tgaaagcgactagattccaagat

SEQ ID NO: 942 - RNA, 23 nt, synthetic construct
  source 1..23: mol_type = other RNA
tcgaaagcgactagattccaaga

SEQ ID NO: 943 - RNA, 23 nt, synthetic construct
  source 1..23: mol_type = other RNA
tacgaaagcgactagattccaag

SEQ ID NO: 944 - RNA, 23 nt, synthetic construct
  source 1..23: mol_type = other RNA
taacgaaagcgactagattccaa

SEQ ID NO: 945 - RNA, 23 nt, synthetic construct
  source 1..23: mol_type = other RNA
ttaacgaaagcgactagattcca

SEQ ID NO: 946 - RNA, 23 nt, synthetic construct
  source 1..23: mol_type = other RNA
ttctactaagatgtagcggtcaa

SEQ ID NO: 947 - RNA, 23 nt, synthetic construct
  source 1..23: mol_type = other RNA
ttgcgagtaccttctttgcccac

SEQ ID NO: 948 - RNA, 23 nt, synthetic construct
  source 1..23: mol_type = other RNA
tttcatgcgagtaccttctttgc

SEQ ID NO: 949 - RNA, 23 nt, synthetic construct
  source 1..23: mol_type = other RNA
tgtatgatagaacttgcccgaga

SEQ ID NO: 950 - RNA, 23 nt, synthetic construct
  source 1..23: mol_type = other RNA
taactgtttgttgagcctcatct

SEQ ID NO: 951 - RNA, 23 nt, synthetic construct
  source 1..23: mol_type = other RNA
tattatagaagatcgtgtgggtg

SEQ ID NO: 952 - RNA, 23 nt, synthetic construct
  source 1..23: mol_type = other RNA
tcattatagaagatcgtgtgggt

SEQ ID NO: 953 - RNA, 23 nt, synthetic construct
  source 1..23: mol_type = other RNA
tactcattatagaagatcgtgtg

SEQ ID NO: 954 - RNA, 23 nt, synthetic construct
  source 1..23: mol_type = other RNA
ttgcttcgatctagttcacgaga

SEQ ID NO: 955 - RNA, 23 nt, synthetic construct
  source 1..23: mol_type = other RNA
tactgatcggattaagcagcact

SEQ ID NO: 956 - RNA, 23 nt, synthetic construct
  source 1..23: mol_type = other RNA
tcataaagacactgatcggatta

SEQ ID NO: 957 - RNA, 23 nt, synthetic construct
  source 1..23: mol_type = other RNA
ttcataaagacactgatcggatt

SEQ ID NO: 958 - RNA, 23 nt, synthetic construct
  source 1..23: mol_type = other RNA
tcgttcctgaggaaaaagttcaa

SEQ ID NO: 959 - RNA, 23 nt, synthetic construct
  source 1..23: mol_type = other RNA
ttcgttcctgaggaaaaagttca

SEQ ID NO: 960 - RNA, 23 nt, synthetic construct
  source 1..23: mol_type = other RNA
tccattgaagaactgaatctcct

SEQ ID NO: 961 - RNA, 23 nt, synthetic construct
  source 1..23: mol_type = other RNA
taggtgtagttcagagcaatggg

SEQ ID NO: 962 - RNA, 23 nt, synthetic construct
  source 1..23: mol_type = other RNA
taaggtgtagttcagagcaatgg

SEQ ID NO: 963 - RNA, 23 nt, synthetic construct
  source 1..23: mol_type = other RNA
ttggtagaaggtgtagttcagag

SEQ ID NO: 964 - RNA, 23 nt, synthetic construct
  source 1..23: mol_type = other RNA
tctgcaaggagcgaagtagcaga

SEQ ID NO: 965 - RNA, 23 nt, synthetic construct
  source 1..23: mol_type = other RNA
taacaagacaacggttctgcaag

SEQ ID NO: 966 - RNA, 23 nt, synthetic construct
  source 1..23: mol_type = other RNA
tagaatagtagccaggaacaaga

SEQ ID NO: 967 - RNA, 23 nt, synthetic construct
  source 1..23: mol_type = other RNA
tgtagaatagtagccaggaacaa

SEQ ID NO: 968 - RNA, 23 nt, synthetic construct
  source 1..23: mol_type = other RNA
ttaatcagcaactgtccagaggg

SEQ ID NO: 969 - RNA, 23 nt, synthetic construct
  source 1..23: mol_type = other RNA
tataatcagcaactgtccagagg

SEQ ID NO: 970 - RNA, 23 nt, synthetic construct
  source 1..23: mol_type = other RNA
tcataatcagcaactgtccagag

SEQ ID NO: 971 - RNA, 23 nt, synthetic construct
  source 1..23: mol_type = other RNA
tccgtaaggaaaaggcgagactc

SEQ ID NO: 972 - RNA, 23 nt, synthetic construct
  source 1..23: mol_type = other RNA
ttccgtaaggaaaaggcgagact

SEQ ID NO: 973 - RNA, 23 nt, synthetic construct
  source 1..23: mol_type = other RNA
taatccgtaaggaaaaggcgaga

SEQ ID NO: 974 - RNA, 23 nt, synthetic construct
  source 1..23: mol_type = other RNA
taaatccgtaaggaaaaggcgag

SEQ ID NO: 975 - RNA, 23 nt, synthetic construct
  source 1..23: mol_type = other RNA
taaaatccgtaaggaaaaggcga

SEQ ID NO: 976 - RNA, 23 nt, synthetic construct
  source 1..23: mol_type = other RNA
tgatagctccaaattatggttcc

SEQ ID NO: 977 - RNA, 23 nt, synthetic construct
  source 1..23: mol_type = other RNA
tgcattgacaggtaaactgctgg

SEQ ID NO: 978 - RNA, 23 nt, synthetic construct
  source 1..23: mol_type = other RNA
taggcattgacaggtaaactgct

SEQ ID NO: 979 - RNA, 23 nt, synthetic construct
  source 1..23: mol_type = other RNA
tcaatgtgaatgacattagagag

SEQ ID NO: 980 - RNA, 21 nt, synthetic construct
  source 1..21: mol_type = other RNA
  modified_base 1: mod_base = OTHER; note = 2'-O-methyladenosine-3'-phosphorothioate
  modified_base 2: mod_base = OTHER; note = 2'-O-methylcytidine-3'-phosphorothioate
  modified_base 3: mod_base = OTHER; note = 2'-O-methylcytidine-3'-phosphate
  modified_base 4: mod_base = OTHER; note = 2'-O-methylguanosine-3'-phosphate
  modified_base 5: mod_base = OTHER; note = 2'-O-methylguanosine-3'-phosphate
  modified_base 6: mod_base = OTHER; note = 2'-O-hexadecyl-guanosine-3'-phosphate
  modified_base 7: mod_base = OTHER; note = 2'-deoxy-2'-fluorouridine-3'-phosphate
  modified_base 8: mod_base = OTHER; note = 2'-O-methyladenosine-3'-phosphate
  modified_base 9: mod_base = OTHER; note = 2'-deoxy-2'-fluorouridine-3'-phosphate
  modified_base 10: mod_base = OTHER; note = 2'-deoxy-2'-fluoroguanosine-3'-phosphate
  modified_base 11: mod_base = OTHER; note = 2'-deoxy-2'-fluoroadenosine-3'-phosphate
  modified_base 12: mod_base = OTHER; note = 2'-O-methyladenosine-3'-phosphate
  modified_base 13: mod_base = OTHER; note = 2'-O-methylguanosine-3'-phosphate
  modified_base 14: mod_base = OTHER; note = 2'-O-methylcytidine-3'-phosphate
  modified_base 15: mod_base = OTHER; note = 2'-O-methyluridine-3'-phosphate
  modified_base 16: mod_base = OTHER; note = 2'-O-methyladenosine-3'-phosphate
  modified_base 17: mod_base = OTHER; note = 2'-O-methyladenosine-3'-phosphate
  modified_base 18: mod_base = OTHER; note = 2'-O-methyladenosine-3'-phosphate
  modified_base 19: mod_base = OTHER; note = 2'-O-methyladenosine-3'-phosphate
  modified_base 20: mod_base = OTHER; note = 2'-O-methyluridine-3'-phosphate
  modified_base 21: mod_base = OTHER; note = 2'-O-methyladenosine-3'-phosphate ((2S,4R)-1-[29-[[2-(acetylamino)-2-deoxy-beta-D-galactopyra nosyl]oxy]-14,14-bis[[3-[[3-[[5-[[2-(acetylamino)-2-deoxy-b eta-D-galactopyranosyl]oxy]-1-oxopentyl]amino]propyl]amino] -3-oxopropoxy]methyl]-1,12,19,25-tetraoxo-16-oxa-13,20,24-t riazanonacos-1-yl]-4-hydroxy-2-pyrrolidinyl)methyl ester
accgggtatgaagctaaaata

SEQ ID NO: 981 - RNA, 21 nt, synthetic construct
  source 1..21: mol_type = other RNA
  modified_base 1: mod_base = OTHER; note = 2'-O-methyluridine-3'-phosphorothioate
  modified_base 2: mod_base = OTHER; note = 2'-O-methylcytidine-3'-phosphorothioate
  modified_base 3: mod_base = OTHER; note = 2'-O-methyluridine-3'-phosphate
  modified_base 4: mod_base = OTHER; note = 2'-O-methylcytidine-3'-phosphate
  modified_base 5: mod_base = OTHER; note = 2'-O-methylcytidine-3'-phosphate
  modified_base 6: mod_base = OTHER; note = 2'-O-hexadecyl-uridine-3'-phosphate
  modified_base 7: mod_base = OTHER; note = 2'-deoxy-2'-fluoroguanosine-3'-phosphate
  modified_base 8: mod_base = OTHER; note = 2'-O-methyluridine-3'-phosphate
  modified_base 9: mod_base = OTHER; note = 2'-deoxy-2'-fluoroadenosine-3'-phosphate
  modified_base 10: mod_base = OTHER; note = 2'-deoxy-2'-fluorouridine-3'-phosphate
  modified_base 11: mod_base = OTHER; note = 2'-deoxy-2'-fluorouridine-3'-phosphate
  modified_base 12: mod_base = OTHER; note = 2'-O-methylguanosine-3'-phosphate
  modified_base 13: mod_base = OTHER; note = 2'-O-methyladenosine-3'-phosphate
  modified_base 14: mod_base = OTHER; note = 2'-O-methyladenosine-3'-phosphate
  modified_base 15: mod_base = OTHER; note = 2'-O-methyladenosine-3'-phosphate
  modified_base 16: mod_base = OTHER; note = 2'-O-methylguanosine-3'-phosphate
  modified_base 17: mod_base = OTHER; note = 2'-O-methylcytidine-3'-phosphate
  modified_base 18: mod_base = OTHER; note = 2'-O-methylguanosine-3'-phosphate
  modified_base 19: mod_base = OTHER; note = 2'-O-methyluridine-3'-phosphate
  modified_base 20: mod_base = OTHER; note = 2'-O-methyluridine-3'-phosphate
  modified_base 21: mod_base = OTHER; note = 2'-O-methyladenosine-3'-phosphate ((2S,4R)-1-[29-[[2-(acetylamino)-2-deoxy-beta-D-galactopyra nosyl]oxy]-14,14-bis[[3-[[3-[[5-[[2-(acetylamino)-2-deoxy-b eta-D-galactopyranosyl]oxy]-1-oxopentyl]amino]propyl]amino] -3-oxopropoxy]methyl]-1,12,19,25-tetraoxo-16-oxa-13,20,24-t riazanonacos-1-yl]-4-hydroxy-2-pyrrolidinyl)methyl ester
tctcctgtattgaaagcgtta

SEQ ID NO: 982 - RNA, 21 nt, synthetic construct
  source 1..21: mol_type = other RNA
  modified_base 1: mod_base = OTHER; note = 2'-O-methylcytidine-3'-phosphorothioate
  modified_base 2: mod_base = OTHER; note = 2'-O-methyluridine-3'-phosphorothioate
  modified_base 3: mod_base = OTHER; note = 2'-O-methylguanosine-3'-phosphate
  modified_base 4: mod_base = OTHER; note = 2'-O-methylcytidine-3'-phosphate
  modified_base 5: mod_base = OTHER; note = 2'-O-methyluridine-3'-phosphate
  modified_base 6: mod_base = OTHER; note = 2'-O-hexadecyl-guanosine-3'-phosphate
  modified_base 7: mod_base = OTHER; note = 2'-deoxy-2'-fluoroadenosine-3'-phosphate
  modified_base 8: mod_base = OTHER; note = 2'-O-methyluridine-3'-phosphate
  modified_base 9: mod_base = OTHER; note = 2'-deoxy-2'-fluorouridine-3'-phosphate
  modified_base 10: mod_base = OTHER; note = 2'-deoxy-2'-fluoroguanosine-3'-phosphate
  modified_base 11: mod_base = OTHER; note = 2'-deoxy-2'-fluoroguanosine-3'-phosphate
  modified_base 12: mod_base = OTHER; note = 2'-O-methyluridine-3'-phosphate
  modified_base 13: mod_base = OTHER; note = 2'-O-methyluridine-3'-phosphate
  modified_base 14: mod_base = OTHER; note = 2'-O-methyluridine-3'-phosphate
  modified_base 15: mod_base = OTHER; note = 2'-O-methylcytidine-3'-phosphate
  modified_base 16: mod_base = OTHER; note = 2'-O-methyladenosine-3'-phosphate
  modified_base 17: mod_base = OTHER; note = 2'-O-methylguanosine-3'-phosphate
  modified_base 18: mod_base = OTHER; note = 2'-O-methyluridine-3'-phosphate
  modified_base 19: mod_base = OTHER; note = 2'-O-methylcytidine-3'-phosphate
  modified_base 20: mod_base = OTHER; note = 2'-O-methyluridine-3'-phosphate
  modified_base 21: mod_base = OTHER; note = 2'-O-methyladenosine-3'-phosphate ((2S,4R)-1-[29-[[2-(acetylamino)-2-deoxy-beta-D-galactopyra nosyl]oxy]-14,14-bis[[3-[[3-[[5-[[2-(acetylamino)-2-deoxy-b eta-D-galactopyranosyl]oxy]-1-oxopentyl]amino]propyl]amino] -3-oxopropoxy]methyl]-1,12,19,25-tetraoxo-16-oxa-13,20,24-t riazanonacos-1-yl]-4-hydroxy-2-pyrrolidinyl)methyl ester
ctgctgattggtttcagtcta

SEQ ID NO: 983 - RNA, 21 nt, synthetic construct
  source 1..21: mol_type = other RNA
  modified_base 1: mod_base = OTHER; note = 2'-O-methylcytidine-3'-phosphorothioate
  modified_base 2: mod_base = OTHER; note = 2'-O-methylcytidine-3'-phosphorothioate
  modified_base 3: mod_base = OTHER; note = 2'-O-methyluridine-3'-phosphate
  modified_base 4: mod_base = OTHER; note = 2'-O-methylcytidine-3'-phosphate
  modified_base 5: mod_base = OTHER; note = 2'-O-methylcytidine-3'-phosphate
  modified_base 6: mod_base = OTHER; note = 2'-O-hexadecyl-adenosine-3'-phosphate
  modified_base 7: mod_base = OTHER; note = 2'-deoxy-2'-fluoroguanosine-3'-phosphate
  modified_base 8: mod_base = OTHER; note = 2'-O-methyladenosine-3'-phosphate
  modified_base 9: mod_base = OTHER; note = 2'-deoxy-2'-fluoroadenosine-3'-phosphate
  modified_base 10: mod_base = OTHER; note = 2'-deoxy-2'-fluoroadenosine-3'-phosphate
  modified_base 11: mod_base = OTHER; note = 2'-deoxy-2'-fluorocytidine-3'-phosphate
  modified_base 12: mod_base = OTHER; note = 2'-O-methyladenosine-3'-phosphate
  modified_base 13: mod_base = OTHER; note = 2'-O-methyladenosine-3'-phosphate
  modified_base 14: mod_base = OTHER; note = 2'-O-methylcytidine-3'-phosphate
  modified_base 15: mod_base = OTHER; note = 2'-O-methyluridine-3'-phosphate
  modified_base 16: mod_base = OTHER; note = 2'-O-methylcytidine-3'-phosphate
  modified_base 17: mod_base = OTHER; note = 2'-O-methylguanosine-3'-phosphate
  modified_base 18: mod_base = OTHER; note = 2'-O-methyladenosine-3'-phosphate
  modified_base 19: mod_base = OTHER; note = 2'-O-methyladenosine-3'-phosphate
  modified_base 20: mod_base = OTHER; note = 2'-O-methylcytidine-3'-phosphate
  modified_base 21: mod_base = OTHER; note = 2'-O-methyladenosine-3'-phosphate ((2S,4R)-1-[29-[[2-(acetylamino)-2-deoxy-beta-D-galactopyra nosyl]oxy]-14,14-bis[[3-[[3-[[5-[[2-(acetylamino)-2-deoxy-b eta-D-galactopyranosyl]oxy]-1-oxopentyl]amino]propyl]amino] -3-oxopropoxy]methyl]-1,12,19,25-tetraoxo-16-oxa-13,20,24-t riazanonacos-1-yl]-4-hydroxy-2-pyrrolidinyl)methyl ester
cctccagaaacaactcgaaca

SEQ ID NO: 984 - RNA, 21 nt, synthetic construct
  source 1..21: mol_type = other RNA
  modified_base 1: mod_base = OTHER; note = 2'-O-methyladenosine-3'-phosphorothioate
  modified_base 2: mod_base = OTHER; note = 2'-O-methyladenosine-3'-phosphorothioate
  modified_base 3: mod_base = OTHER; note = 2'-O-methylguanosine-3'-phosphate
  modified_base 4: mod_base = OTHER; note = 2'-O-methyluridine-3'-phosphate
  modified_base 5: mod_base = OTHER; note = 2'-O-methylguanosine-3'-phosphate
  modified_base 6: mod_base = OTHER; note = 2'-O-hexadecyl-cytidine-3'-phosphate
  modified_base 7: mod_base = OTHER; note = 2'-deoxy-2'-fluoroadenosine-3'-phosphate
  modified_base 8: mod_base = OTHER; note = 2'-O-methyluridine-3'-phosphate
  modified_base 9: mod_base = OTHER; note = 2'-deoxy-2'-fluoroadenosine-3'-phosphate
  modified_base 10: mod_base = OTHER; note = 2'-deoxy-2'-fluorocytidine-3'-phosphate
  modified_base 11: mod_base = OTHER; note = 2'-deoxy-2'-fluorouridine-3'-phosphate
  modified_base 12: mod_base = OTHER; note = 2'-O-methylcytidine-3'-phosphate
  modified_base 13: mod_base = OTHER; note = 2'-O-methyladenosine-3'-phosphate
  modified_base 14: mod_base = OTHER; note = 2'-O-methylcytidine-3'-phosphate
  modified_base 15: mod_base = OTHER; note = 2'-O-methyladenosine-3'-phosphate
  modified_base 16: mod_base = OTHER; note = 2'-O-methyladenosine-3'-phosphate
  modified_base 17: mod_base = OTHER; note = 2'-O-methylcytidine-3'-phosphate
  modified_base 18: mod_base = OTHER; note = 2'-O-methyluridine-3'-phosphate
  modified_base 19: mod_base = OTHER; note = 2'-O-methylguanosine-3'-phosphate
  modified_base 20: mod_base = OTHER; note = 2'-O-methylguanosine-3'-phosphate
  modified_base 21: mod_base = OTHER; note = 2'-O-methyladenosine-3'-phosphate ((2S,4R)-1-[29-[[2-(acetylamino)-2-deoxy-beta-D-galactopyra nosyl]oxy]-14,14-bis[[3-[[3-[[5-[[2-(acetylamino)-2-deoxy-b eta-D-galactopyranosyl]oxy]-1-oxopentyl]amino]propyl]amino] -3-oxopropoxy]methyl]-1,12,19,25-tetraoxo-16-oxa-13,20,24-t riazanonacos-1-yl]-4-hydroxy-2-pyrrolidinyl)methyl ester
aagtgcatactcacaactgga

SEQ ID NO: 985 - RNA, 21 nt, synthetic construct
  source 1..21: mol_type = other RNA
  modified_base 1: mod_base = OTHER; note = 2'-O-methylcytidine-3'-phosphorothioate
  modified_base 2: mod_base = OTHER; note = 2'-O-methyluridine-3'-phosphorothioate
  modified_base 3: mod_base = OTHER; note = 2'-O-methyluridine-3'-phosphate
  modified_base 4: mod_base = OTHER; note = 2'-O-methylguanosine-3'-phosphate
  modified_base 5: mod_base = OTHER; note = 2'-O-methylguanosine-3'-phosphate
  modified_base 6: mod_base = OTHER; note = 2'-O-hexadecyl-adenosine-3'-phosphate
  modified_base 7: mod_base = OTHER; note = 2'-deoxy-2'-fluoroadenosine-3'-phosphate
  modified_base 8: mod_base = OTHER; note = 2'-O-methyluridine-3'-phosphate
  modified_base 9: mod_base = OTHER; note = 2'-deoxy-2'-fluorocytidine-3'-phosphate
  modified_base 10: mod_base = OTHER; note = 2'-deoxy-2'-fluorouridine-3'-phosphate
  modified_base 11: mod_base = OTHER; note = 2'-deoxy-2'-fluoroadenosine-3'-phosphate
  modified_base 12: mod_base = OTHER; note = 2'-O-methylguanosine-3'-phosphate
  modified_base 13: mod_base = OTHER; note = 2'-O-methyluridine-3'-phosphate
  modified_base 14: mod_base = OTHER; note = 2'-O-methylcytidine-3'-phosphate
  modified_base 15: mod_base = OTHER; note = 2'-O-methylguanosine-3'-phosphate
  modified_base 16: mod_base = OTHER; note = 2'-O-methylcytidine-3'-phosphate
  modified_base 17: mod_base = OTHER; note = 2'-O-methyluridine-3'-phosphate
  modified_base 18: mod_base = OTHER; note = 2'-O-methyluridine-3'-phosphate
  modified_base 19: mod_base = OTHER; note = 2'-O-methyluridine-3'-phosphate
  modified_base 20: mod_base = OTHER; note = 2'-O-methylcytidine-3'-phosphate
  modified_base 21: mod_base = OTHER; note = 2'-O-methyladenosine-3'-phosphate ((2S,4R)-1-[29-[[2-(acetylamino)-2-deoxy-beta-D-galactopyra nosyl]oxy]-14,14-bis[[3-[[3-[[5-[[2-(acetylamino)-2-deoxy-b eta-D-galactopyranosyl]oxy]-1-oxopentyl]amino]propyl]amino] -3-oxopropoxy]methyl]-1,12,19,25-tetraoxo-16-oxa-13,20,24-t riazanonacos-1-yl]-4-hydroxy-2-pyrrolidinyl)methyl ester
cttggaatctagtcgctttca

SEQ ID NO: 986 - RNA, 21 nt, synthetic construct
  source 1..21: mol_type = other RNA
  modified_base 1: mod_base = OTHER; note = 2'-O-methyluridine-3'-phosphorothioate
  modified_base 2: mod_base = OTHER; note = 2'-O-methyluridine-3'-phosphorothioate
  modified_base 3: mod_base = OTHER; note = 2'-O-methylguanosine-3'-phosphate
  modified_base 4: mod_base = OTHER; note = 2'-O-methylguanosine-3'-phosphate
  modified_base 5: mod_base = OTHER; note = 2'-O-methyladenosine-3'-phosphate
  modified_base 6: mod_base = OTHER; note = 2'-O-hexadecyl-adenosine-3'-phosphate
  modified_base 7: mod_base = OTHER; note = 2'-deoxy-2'-fluorouridine-3'-phosphate
  modified_base 8: mod_base = OTHER; note = 2'-O-methylcytidine-3'-phosphate
  modified_base 9: mod_base = OTHER; note = 2'-deoxy-2'-fluorouridine-3'-phosphate
  modified_base 10: mod_base = OTHER; note = 2'-deoxy-2'-fluoroadenosine-3'-phosphate
  modified_base 11: mod_base = OTHER; note = 2'-deoxy-2'-fluoroguanosine-3'-phosphate
  modified_base 12: mod_base = OTHER; note = 2'-O-methyluridine-3'-phosphate
  modified_base 13: mod_base = OTHER; note = 2'-O-methylcytidine-3'-phosphate
  modified_base 14: mod_base = OTHER; note = 2'-O-methylguanosine-3'-phosphate
  modified_base 15: mod_base = OTHER; note = 2'-O-methylcytidine-3'-phosphate
  modified_base 16: mod_base = OTHER; note = 2'-O-methyluridine-3'-phosphate
  modified_base 17: mod_base = OTHER; note = 2'-O-methyluridine-3'-phosphate
  modified_base 18: mod_base = OTHER; note = 2'-O-methyluridine-3'-phosphate
  modified_base 19: mod_base = OTHER; note = 2'-O-methylcytidine-3'-phosphate
  modified_base 20: mod_base = OTHER; note = 2'-O-methylguanosine-3'-phosphate
  modified_base 21: mod_base = OTHER; note = 2'-O-methyladenosine-3'-phosphate ((2S,4R)-1-[29-[[2-(acetylamino)-2-deoxy-beta-D-galactopyra nosyl]oxy]-14,14-bis[[3-[[3-[[5-[[2-(acetylamino)-2-deoxy-b eta-D-galactopyranosyl]oxy]-1-oxopentyl]amino]propyl]amino] -3-oxopropoxy]methyl]-1,12,19,25-tetraoxo-16-oxa-13,20,24-t riazanonacos-1-yl]-4-hydroxy-2-pyrrolidinyl)methyl ester
ttggaatctagtcgctttcga

SEQ ID NO: 987 - RNA, 21 nt, synthetic construct
  source 1..21: mol_type = other RNA
  modified_base 1: mod_base = OTHER; note = 2'-O-methyluridine-3'-phosphorothioate
  modified_base 2: mod_base = OTHER; note = 2'-O-methylguanosine-3'-phosphorothioate
  modified_base 3: mod_base = OTHER; note = 2'-O-methylguanosine-3'-phosphate
  modified_base 4: mod_base = OTHER; note = 2'-O-methyladenosine-3'-phosphate
  modified_base 5: mod_base = OTHER; note = 2'-O-methyladenosine-3'-phosphate
  modified_base 6: mod_base = OTHER; note = 2'-O-hexadecyl-uridine-3'-phosphate
  modified_base 7: mod_base = OTHER; note = 2'-deoxy-2'-fluorocytidine-3'-phosphate
  modified_base 8: mod_base = OTHER; note = 2'-O-methyluridine-3'-phosphate
  modified_base 9: mod_base = OTHER; note = 2'-deoxy-2'-fluoroadenosine-3'-phosphate
  modified_base 10: mod_base = OTHER; note = 2'-deoxy-2'-fluoroguanosine-3'-phosphate
  modified_base 11: mod_base = OTHER; note = 2'-deoxy-2'-fluorouridine-3'-phosphate
  modified_base 12: mod_base = OTHER; note = 2'-O-methylcytidine-3'-phosphate
  modified_base 13: mod_base = OTHER; note = 2'-O-methylguanosine-3'-phosphate
  modified_base 14: mod_base = OTHER; note = 2'-O-methylcytidine-3'-phosphate
  modified_base 15: mod_base = OTHER; note = 2'-O-methyluridine-3'-phosphate
  modified_base 16: mod_base = OTHER; note = 2'-O-methyluridine-3'-phosphate
  modified_base 17: mod_base = OTHER; note = 2'-O-methyluridine-3'-phosphate
  modified_base 18: mod_base = OTHER; note = 2'-O-methylcytidine-3'-phosphate
  modified_base 19: mod_base = OTHER; note = 2'-O-methylguanosine-3'-phosphate
  modified_base 20: mod_base = OTHER; note = 2'-O-methyluridine-3'-phosphate
  modified_base 21: mod_base = OTHER; note = 2'-O-methyladenosine-3'-phosphate ((2S,4R)-1-[29-[[2-(acetylamino)-2-deoxy-beta-D-galactopyra nosyl]oxy]-14,14-bis[[3-[[3-[[5-[[2-(acetylamino)-2-deoxy-b eta-D-galactopyranosyl]oxy]-1-oxopentyl]amino]propyl]amino] -3-oxopropoxy]methyl]-1,12,19,25-tetraoxo-16-oxa-13,20,24-t riazanonacos-1-yl]-4-hydroxy-2-pyrrolidinyl)methyl ester
tggaatctagtcgctttcgta

SEQ ID NO: 988 - RNA, 21 nt, synthetic construct
  source 1..21: mol_type = other RNA
  modified_base 1: mod_base = OTHER; note = 2'-O-methylguanosine-3'-phosphorothioate
  modified_base 2: mod_base = OTHER; note = 2'-O-methylguanosine-3'-phosphorothioate
  modified_base 3: mod_base = OTHER; note = 2'-O-methyladenosine-3'-phosphate
  modified_base 4: mod_base = OTHER; note = 2'-O-methyladenosine-3'-phosphate
  modified_base 5: mod_base = OTHER; note = 2'-O-methyluridine-3'-phosphate
  modified_base 6: mod_base = OTHER; note = 2'-O-hexadecyl-cytidine-3'-phosphate
  modified_base 7: mod_base = OTHER; note = 2'-deoxy-2'-fluorouridine-3'-phosphate
  modified_base 8: mod_base = OTHER; note = 2'-O-methyladenosine-3'-phosphate
  modified_base 9: mod_base = OTHER; note = 2'-deoxy-2'-fluoroguanosine-3'-phosphate
  modified_base 10: mod_base = OTHER; note = 2'-deoxy-2'-fluorouridine-3'-phosphate
  modified_base 11: mod_base = OTHER; note = 2'-deoxy-2'-fluorocytidine-3'-phosphate
  modified_base 12: mod_base = OTHER; note = 2'-O-methylguanosine-3'-phosphate
  modified_base 13: mod_base = OTHER; note = 2'-O-methylcytidine-3'-phosphate
  modified_base 14: mod_base = OTHER; note = 2'-O-methyluridine-3'-phosphate
  modified_base 15: mod_base = OTHER; note = 2'-O-methyluridine-3'-phosphate
  modified_base 16: mod_base = OTHER; note = 2'-O-methyluridine-3'-phosphate
  modified_base 17: mod_base = OTHER; note = 2'-O-methylcytidine-3'-phosphate
  modified_base 18: mod_base = OTHER; note = 2'-O-methylguanosine-3'-phosphate
  modified_base 19: mod_base = OTHER; note = 2'-O-methyluridine-3'-phosphate
  modified_base 20: mod_base = OTHER; note = 2'-O-methyluridine-3'-phosphate
  modified_base 21: mod_base = OTHER; note = 2'-O-methyladenosine-3'-phosphate ((2S,4R)-1-[29-[[2-(acetylamino)-2-deoxy-beta-D-galactopyra nosyl]oxy]-14,14-bis[[3-[[3-[[5-[[2-(acetylamino)-2-deoxy-b eta-D-galactopyranosyl]oxy]-1-oxopentyl]amino]propyl]amino] -3-oxopropoxy]methyl]-1,12,19,25-tetraoxo-16-oxa-13,20,24-t riazanonacos-1-yl]-4-hydroxy-2-pyrrolidinyl)methyl ester
ggaatctagtcgctttcgtta

SEQ ID NO: 989 - RNA, 21 nt, synthetic construct
  source 1..21: mol_type = other RNA
  modified_base 1: mod_base = OTHER; note = 2'-O-methylguanosine-3'-phosphorothioate
  modified_base 2: mod_base = OTHER; note = 2'-O-methyladenosine-3'-phosphorothioate
  modified_base 3: mod_base = OTHER; note = 2'-O-methyladenosine-3'-phosphate
  modified_base 4: mod_base = OTHER; note = 2'-O-methyluridine-3'-phosphate
  modified_base 5: mod_base = OTHER; note = 2'-O-methylcytidine-3'-phosphate
  modified_base 6: mod_base = OTHER; note = 2'-O-hexadecyl-uridine-3'-phosphate
  modified_base 7: mod_base = OTHER; note = 2'-deoxy-2'-fluoroadenosine-3'-phosphate
  modified_base 8: mod_base = OTHER; note = 2'-O-methylguanosine-3'-phosphate
  modified_base 9: mod_base = OTHER; note = 2'-deoxy-2'-fluorouridine-3'-phosphate
  modified_base 10: mod_base = OTHER; note = 2'-deoxy-2'-fluorocytidine-3'-phosphate
  modified_base 11: mod_base = OTHER; note = 2'-deoxy-2'-fluoroguanosine-3'-phosphate
  modified_base 12: mod_base = OTHER; note = 2'-O-methylcytidine-3'-phosphate
  modified_base 13: mod_base = OTHER; note = 2'-O-methyluridine-3'-phosphate
  modified_base 14: mod_base = OTHER; note = 2'-O-methyluridine-3'-phosphate
  modified_base 15: mod_base = OTHER; note = 2'-O-methyluridine-3'-phosphate
  modified_base 16: mod_base = OTHER; note = 2'-O-methylcytidine-3'-phosphate
  modified_base 17: mod_base = OTHER; note = 2'-O-methylguanosine-3'-phosphate
  modified_base 18: mod_base = OTHER; note = 2'-O-methyluridine-3'-phosphate
  modified_base 19: mod_base = OTHER; note = 2'-O-methyluridine-3'-phosphate
  modified_base 20: mod_base = OTHER; note = 2'-O-methyladenosine-3'-phosphate
  modified_base 21: mod_base = OTHER; note = 2'-O-methyladenosine-3'-phosphate ((2S,4R)-1-[29-[[2-(acetylamino)-2-deoxy-beta-D-galactopyra nosyl]oxy]-14,14-bis[[3-[[3-[[5-[[2-(acetylamino)-2-deoxy-b eta-D-galactopyranosyl]oxy]-1-oxopentyl]amino]propyl]amino] -3-oxopropoxy]methyl]-1,12,19,25-tetraoxo-16-oxa-13,20,24-t riazanonacos-1-yl]-4-hydroxy-2-pyrrolidinyl)methyl ester
gaatctagtcgctttcgttaa

SEQ ID NO: 990 - RNA, 21 nt, synthetic construct
  source 1..21: mol_type = other RNA
  modified_base 1: mod_base = OTHER; note = 2'-O-methylguanosine-3'-phosphorothioate
  modified_base 2: mod_base = OTHER; note = 2'-O-methyladenosine-3'-phosphorothioate
  modified_base 3: mod_base = OTHER; note = 2'-O-methylcytidine-3'-phosphate
  modified_base 4: mod_base = OTHER; note = 2'-O-methylcytidine-3'-phosphate
  modified_base 5: mod_base = OTHER; note = 2'-O-methylguanosine-3'-phosphate
  modified_base 6: mod_base = OTHER; note = 2'-O-hexadecyl-cytidine-3'-phosphate
  modified_base 7: mod_base = OTHER; note = 2'-deoxy-2'-fluorouridine-3'-phosphate
  modified_base 8: mod_base = OTHER; note = 2'-O-methyladenosine-3'-phosphate
  modified_base 9: mod_base = OTHER; note = 2'-deoxy-2'-fluorocytidine-3'-phosphate
  modified_base 10: mod_base = OTHER; note = 2'-deoxy-2'-fluoroadenosine-3'-phosphate
  modified_base 11: mod_base = OTHER; note = 2'-deoxy-2'-fluorouridine-3'-phosphate
  modified_base 12: mod_base = OTHER; note = 2'-O-methylcytidine-3'-phosphate
  modified_base 13: mod_base = OTHER; note = 2'-O-methyluridine-3'-phosphate
  modified_base 14: mod_base = OTHER; note = 2'-O-methyluridine-3'-phosphate
  modified_base 15: mod_base = OTHER; note = 2'-O-methyladenosine-3'-phosphate
  modified_base 16: mod_base = OTHER; note = 2'-O-methylguanosine-3'-phosphate
  modified_base 17: mod_base = OTHER; note = 2'-O-methyluridine-3'-phosphate
  modified_base 18: mod_base = OTHER; note = 2'-O-methyladenosine-3'-phosphate
  modified_base 19: mod_base = OTHER; note = 2'-O-methylguanosine-3'-phosphate
  modified_base 20: mod_base = OTHER; note = 2'-O-methyladenosine-3'-phosphate
  modified_base 21: mod_base = OTHER; note = 2'-O-methyladenosine-3'-phosphate ((2S,4R)-1-[29-[[2-(acetylamino)-2-deoxy-beta-D-galactopyra nosyl]oxy]-14,14-bis[[3-[[3-[[5-[[2-(acetylamino)-2-deoxy-b eta-D-galactopyranosyl]oxy]-1-oxopentyl]amino]propyl]amino] -3-oxopropoxy]methyl]-1,12,19,25-tetraoxo-16-oxa-13,20,24-t riazanonacos-1-yl]-4-hydroxy-2-pyrrolidinyl)methyl ester
gaccgctacatcttagtagaa

SEQ ID NO: 991 - RNA, 21 nt, synthetic construct
  source 1..21: mol_type = other RNA
  modified_base 1: mod_base = OTHER; note = 2'-O-methylguanosine-3'-phosphorothioate
  modified_base 2: mod_base = OTHER; note = 2'-O-methylguanosine-3'-phosphorothioate
  modified_base 3: mod_base = OTHER; note = 2'-O-methylguanosine-3'-phosphate
  modified_base 4: mod_base = OTHER; note = 2'-O-methylcytidine-3'-phosphate
  modified_base 5: mod_base = OTHER; note = 2'-O-methyladenosine-3'-phosphate
  modified_base 6: mod_base = OTHER; note = 2'-O-hexadecyl-adenosine-3'-phosphate
  modified_base 7: mod_base = OTHER; note = 2'-deoxy-2'-fluoroadenosine-3'-phosphate
  modified_base 8: mod_base = OTHER; note = 2'-O-methylguanosine-3'-phosphate
  modified_base 9: mod_base = OTHER; note = 2'-deoxy-2'-fluoroadenosine-3'-phosphate
  modified_base 10: mod_base = OTHER; note = 2'-deoxy-2'-fluoroadenosine-3'-phosphate
  modified_base 11: mod_base = OTHER; note = 2'-deoxy-2'-fluoroguanosine-3'-phosphate
  modified_base 12: mod_base = OTHER; note = 2'-O-methylguanosine-3'-phosphate
  modified_base 13: mod_base = OTHER; note = 2'-O-methyluridine-3'-phosphate
  modified_base 14: mod_base = OTHER; note = 2'-O-methyladenosine-3'-phosphate
  modified_base 15: mod_base = OTHER; note = 2'-O-methylcytidine-3'-phosphate
  modified_base 16: mod_base = OTHER; note = 2'-O-methyluridine-3'-phosphate
  modified_base 17: mod_base = OTHER; note = 2'-O-methylcytidine-3'-phosphate
  modified_base 18: mod_base = OTHER; note = 2'-O-methylguanosine-3'-phosphate
  modified_base 19: mod_base = OTHER; note = 2'-O-methylcytidine-3'-phosphate
  modified_base 20: mod_base = OTHER; note = 2'-O-methyladenosine-3'-phosphate
  modified_base 21: mod_base = OTHER; note = 2'-O-methyladenosine-3'-phosphate ((2S,4R)-1-[29-[[2-(acetylamino)-2-deoxy-beta-D-galactopyra nosyl]oxy]-14,14-bis[[3-[[3-[[5-[[2-(acetylamino)-2-deoxy-b eta-D-galactopyranosyl]oxy]-1-oxopentyl]amino]propyl]amino] -3-oxopropoxy]methyl]-1,12,19,25-tetraoxo-16-oxa-13,20,24-t riazanonacos-1-yl]-4-hydroxy-2-pyrrolidinyl)methyl ester
gggcaaagaaggtactcgcaa

SEQ ID NO: 992 - RNA, 21 nt, synthetic construct
  source 1..21: mol_type = other RNA
  modified_base 1: mod_base = OTHER; note = 2'-O-methyladenosine-3'-phosphorothioate
  modified_base 2: mod_base = OTHER; note = 2'-O-methyladenosine-3'-phosphorothioate
  modified_base 3: mod_base = OTHER; note = 2'-O-methyladenosine-3'-phosphate
  modified_base 4: mod_base = OTHER; note = 2'-O-methylguanosine-3'-phosphate
  modified_base 5: mod_base = OTHER; note = 2'-O-methyladenosine-3'-phosphate
  modified_base 6: mod_base = OTHER; note = 2'-O-hexadecyl-adenosine-3'-phosphate
  modified_base 7: mod_base = OTHER; note = 2'-deoxy-2'-fluoroguanosine-3'-phosphate
  modified_base 8: mod_base = OTHER; note = 2'-O-methylguanosine-3'-phosphate
  modified_base 9: mod_base = OTHER; note = 2'-deoxy-2'-fluorouridine-3'-phosphate
  modified_base 10: mod_base = OTHER; note = 2'-deoxy-2'-fluoroadenosine-3'-phosphate
  modified_base 11: mod_base = OTHER; note = 2'-deoxy-2'-fluorocytidine-3'-phosphate
  modified_base 12: mod_base = OTHER; note = 2'-O-methyluridine-3'-phosphate
  modified_base 13: mod_base = OTHER; note = 2'-O-methylcytidine-3'-phosphate
  modified_base 14: mod_base = OTHER; note = 2'-O-methylguanosine-3'-phosphate
  modified_base 15: mod_base = OTHER; note = 2'-O-methylcytidine-3'-phosphate
  modified_base 16: mod_base = OTHER; note = 2'-O-methyladenosine-3'-phosphate
  modified_base 17: mod_base = OTHER; note = 2'-O-methyluridine-3'-phosphate
  modified_base 18: mod_base = OTHER; note = 2'-O-methylguanosine-3'-phosphate
  modified_base 19: mod_base = OTHER; note = 2'-O-methyladenosine-3'-phosphate
  modified_base 20: mod_base = OTHER; note = 2'-O-methyladenosine-3'-phosphate
  modified_base 21: mod_base = OTHER; note = 2'-O-methyladenosine-3'-phosphate ((2S,4R)-1-[29-[[2-(acetylamino)-2-deoxy-beta-D-galactopyra nosyl]oxy]-14,14-bis[[3-[[3-[[5-[[2-(acetylamino)-2-deoxy-b eta-D-galactopyranosyl]oxy]-1-oxopentyl]amino]propyl]amino] -3-oxopropoxy]methyl]-1,12,19,25-tetraoxo-16-oxa-13,20,24-t riazanonacos-1-yl]-4-hydroxy-2-pyrrolidinyl)methyl ester
aaagaaggtactcgcatgaaa

SEQ ID NO: 993 - RNA, 21 nt, synthetic construct
  source 1..21: mol_type = other RNA
  modified_base 1: mod_base = OTHER; note = 2'-O-methyluridine-3'-phosphorothioate
  modified_base 2: mod_base = OTHER; note = 2'-O-methylcytidine-3'-phosphorothioate
  modified_base 3: mod_base = OTHER; note = 2'-O-methylguanosine-3'-phosphate
  modified_base 4: mod_base = OTHER; note = 2'-O-methylguanosine-3'-phosphate
  modified_base 5: mod_base = OTHER; note = 2'-O-methylguanosine-3'-phosphate
  modified_base 6: mod_base = OTHER; note = 2'-O-hexadecyl-cytidine-3'-phosphate
  modified_base 7: mod_base = OTHER; note = 2'-deoxy-2'-fluoroadenosine-3'-phosphate
  modified_base 8: mod_base = OTHER; note = 2'-O-methyladenosine-3'-phosphate
  modified_base 9: mod_base = OTHER; note = 2'-deoxy-2'-fluoroguanosine-3'-phosphate
  modified_base 10: mod_base = OTHER; note = 2'-deoxy-2'-fluorouridine-3'-phosphate
  modified_base 11: mod_base = OTHER; note = 2'-deoxy-2'-fluorouridine-3'-phosphate
  modified_base 12: mod_base = OTHER; note = 2'-O-methylcytidine-3'-phosphate
  modified_base 13: mod_base = OTHER; note = 2'-O-methyluridine-3'-phosphate
  modified_base 14: mod_base = OTHER; note = 2'-O-methyladenosine-3'-phosphate
  modified_base 15: mod_base = OTHER; note = 2'-O-methyluridine-3'-phosphate
  modified_base 16: mod_base = OTHER; note = 2'-O-methylcytidine-3'-phosphate
  modified_base 17: mod_base = OTHER; note = 2'-O-methyladenosine-3'-phosphate
  modified_base 18: mod_base = OTHER; note = 2'-O-methyluridine-3'-phosphate
  modified_base 19: mod_base = OTHER; note = 2'-O-methyladenosine-3'-phosphate
  modified_base 20: mod_base = OTHER; note = 2'-O-methylcytidine-3'-phosphate
  modified_base 21: mod_base = OTHER; note = 2'-O-methyladenosine-3'-phosphate ((2S,4R)-1-[29-[[2-(acetylamino)-2-deoxy-beta-D-galactopyra nosyl]oxy]-14,14-bis[[3-[[3-[[5-[[2-(acetylamino)-2-deoxy-b eta-D-galactopyranosyl]oxy]-1-oxopentyl]amino]propyl]amino] -3-oxopropoxy]methyl]-1,12,19,25-tetraoxo-16-oxa-13,20,24-t riazanonacos-1-yl]-4-hydroxy-2-pyrrolidinyl)methyl ester
tcgggcaagttctatcataca

SEQ ID NO: 994 - RNA, 21 nt, synthetic construct
  source 1..21: mol_type = other RNA
  modified_base 1: mod_base = OTHER; note = 2'-O-methyladenosine-3'-phosphorothioate
  modified_base 2: mod_base = OTHER; note = 2'-O-methyluridine-3'-phosphorothioate
  modified_base 3: mod_base = OTHER; note = 2'-O-methylguanosine-3'-phosphate
  modified_base 4: mod_base = OTHER; note = 2'-O-methyladenosine-3'-phosphate
  modified_base 5: mod_base = OTHER; note = 2'-O-methylguanosine-3'-phosphate
  modified_base 6: mod_base = OTHER; note = 2'-O-hexadecyl-guanosine-3'-phosphate
  modified_base 7: mod_base = OTHER; note = 2'-deoxy-2'-fluorocytidine-3'-phosphate
  modified_base 8: mod_base = OTHER; note = 2'-O-methyluridine-3'-phosphate
  modified_base 9: mod_base = OTHER; note = 2'-deoxy-2'-fluorocytidine-3'-phosphate
  modified_base 10: mod_base = OTHER; note = 2'-deoxy-2'-fluoroadenosine-3'-phosphate
  modified_base 11: mod_base = OTHER; note = 2'-deoxy-2'-fluoroadenosine-3'-phosphate
  modified_base 12: mod_base = OTHER; note = 2'-O-methylcytidine-3'-phosphate
  modified_base 13: mod_base = OTHER; note = 2'-O-methyladenosine-3'-phosphate
  modified_base 14: mod_base = OTHER; note = 2'-O-methyladenosine-3'-phosphate
  modified_base 15: mod_base = OTHER; note = 2'-O-methyladenosine-3'-phosphate
  modified_base 16: mod_base = OTHER; note = 2'-O-methylcytidine-3'-phosphate
  modified_base 17: mod_base = OTHER; note = 2'-O-methyladenosine-3'-phosphate
  modified_base 18: mod_base = OTHER; note = 2'-O-methylguanosine-3'-phosphate
  modified_base 19: mod_base = OTHER; note = 2'-O-methyluridine-3'-phosphate
  modified_base 20: mod_base = OTHER; note = 2'-O-methyluridine-3'-phosphate
  modified_base 21: mod_base = OTHER; note = 2'-O-methyladenosine-3'-phosphate ((2S,4R)-1-[29-[[2-(acetylamino)-2-deoxy-beta-D-galactopyra nosyl]oxy]-14,14-bis[[3-[[3-[[5-[[2-(acetylamino)-2-deoxy-b eta-D-galactopyranosyl]oxy]-1-oxopentyl]amino]propyl]amino] -3-oxopropoxy]methyl]-1,12,19,25-tetraoxo-16-oxa-13,20,24-t riazanonacos-1-yl]-4-hydroxy-2-pyrrolidinyl)methyl ester
atgaggctcaacaaacagtta

SEQ ID NO: 995 - RNA, 21 nt, synthetic construct
  source 1..21: mol_type = other RNA
  modified_base 1: mod_base = OTHER; note = 2'-O-methylcytidine-3'-phosphorothioate
  modified_base 2: mod_base = OTHER; note = 2'-O-methylcytidine-3'-phosphorothioate
  modified_base 3: mod_base = OTHER; note = 2'-O-methylcytidine-3'-phosphate
  modified_base 4: mod_base = OTHER; note = 2'-O-methyladenosine-3'-phosphate
  modified_base 5: mod_base = OTHER; note = 2'-O-methylcytidine-3'-phosphate
  modified_base 6: mod_base = OTHER; note = 2'-O-hexadecyl-adenosine-3'-phosphate
  modified_base 7: mod_base = OTHER; note = 2'-deoxy-2'-fluorocytidine-3'-phosphate
  modified_base 8: mod_base = OTHER; note = 2'-O-methylguanosine-3'-phosphate
  modified_base 9: mod_base = OTHER; note = 2'-deoxy-2'-fluoroadenosine-3'-phosphate
  modified_base 10: mod_base = OTHER; note = 2'-deoxy-2'-fluorouridine-3'-phosphate
  modified_base 11: mod_base = OTHER; note = 2'-deoxy-2'-fluorocytidine-3'-phosphate
  modified_base 12: mod_base = OTHER; note = 2'-O-methyluridine-3'-phosphate
  modified_base 13: mod_base = OTHER; note = 2'-O-methyluridine-3'-phosphate
  modified_base 14: mod_base = OTHER; note = 2'-O-methylcytidine-3'-phosphate
  modified_base 15: mod_base = OTHER; note = 2'-O-methyluridine-3'-phosphate
  modified_base 16: mod_base = OTHER; note = 2'-O-methyladenosine-3'-phosphate
  modified_base 17: mod_base = OTHER; note = 2'-O-methyluridine-3'-phosphate
  modified_base 18: mod_base = OTHER; note = 2'-O-methyladenosine-3'-phosphate
  modified_base 19: mod_base = OTHER; note = 2'-O-methyladenosine-3'-phosphate
  modified_base 20: mod_base = OTHER; note = 2'-O-methyluridine-3'-phosphate
  modified_base 21: mod_base = OTHER; note = 2'-O-methyladenosine-3'-phosphate ((2S,4R)-1-[29-[[2-(acetylamino)-2-deoxy-beta-D-galactopyra nosyl]oxy]-14,14-bis[[3-[[3-[[5-[[2-(acetylamino)-2-deoxy-b eta-D-galactopyranosyl]oxy]-1-oxopentyl]amino]propyl]amino] -3-oxopropoxy]methyl]-1,12,19,25-tetraoxo-16-oxa-13,20,24-t riazanonacos-1-yl]-4-hydroxy-2-pyrrolidinyl)methyl ester
cccacacgatcttctataata

SEQ ID NO: 996 - RNA, 21 nt, synthetic construct
  source 1..21: mol_type = other RNA
  modified_base 1: mod_base = OTHER; note = 2'-O-methylcytidine-3'-phosphorothioate
  modified_base 2: mod_base = OTHER; note = 2'-O-methylcytidine-3'-phosphorothioate
  modified_base 3: mod_base = OTHER; note = 2'-O-methyladenosine-3'-phosphate
  modified_base 4: mod_base = OTHER; note = 2'-O-methylcytidine-3'-phosphate
  modified_base 5: mod_base = OTHER; note = 2'-O-methyladenosine-3'-phosphate
  modified_base 6: mod_base = OTHER; note = 2'-O-hexadecyl-cytidine-3'-phosphate
  modified_base 7: mod_base = OTHER; note = 2'-deoxy-2'-fluoroguanosine-3'-phosphate
  modified_base 8: mod_base = OTHER; note = 2'-O-methyladenosine-3'-phosphate
  modified_base 9: mod_base = OTHER; note = 2'-deoxy-2'-fluorouridine-3'-phosphate
  modified_base 10: mod_base = OTHER; note = 2'-deoxy-2'-fluorocytidine-3'-phosphate
  modified_base 11: mod_base = OTHER; note = 2'-deoxy-2'-fluorouridine-3'-phosphate
  modified_base 12: mod_base = OTHER; note = 2'-O-methyluridine-3'-phosphate
  modified_base 13: mod_base = OTHER; note = 2'-O-methylcytidine-3'-phosphate
  modified_base 14: mod_base = OTHER; note = 2'-O-methyluridine-3'-phosphate
  modified_base 15: mod_base = OTHER; note = 2'-O-methyladenosine-3'-phosphate
  modified_base 16: mod_base = OTHER; note = 2'-O-methyluridine-3'-phosphate
  modified_base 17: mod_base = OTHER; note = 2'-O-methyladenosine-3'-phosphate
  modified_base 18: mod_base = OTHER; note = 2'-O-methyladenosine-3'-phosphate
  modified_base 19: mod_base = OTHER; note = 2'-O-methyluridine-3'-phosphate
  modified_base 20: mod_base = OTHER; note = 2'-O-methylguanosine-3'-phosphate
  modified_base 21: mod_base = OTHER; note = 2'-O-methyladenosine-3'-phosphate ((2S,4R)-1-[29-[[2-(acetylamino)-2-deoxy-beta-D-galactopyra nosyl]oxy]-14,14-bis[[3-[[3-[[5-[[2-(acetylamino)-2-deoxy-b eta-D-galactopyranosyl]oxy]-1-oxopentyl]amino]propyl]amino] -3-oxopropoxy]methyl]-1,12,19,25-tetraoxo-16-oxa-13,20,24-t riazanonacos-1-yl]-4-hydroxy-2-pyrrolidinyl)methyl ester
ccacacgatcttctataatga

SEQ ID NO: 997 - RNA, 21 nt, synthetic construct
  source 1..21: mol_type = other RNA
  modified_base 1: mod_base = OTHER; note = 2'-O-methylcytidine-3'-phosphorothioate
  modified_base 2: mod_base = OTHER; note = 2'-O-methyladenosine-3'-phosphorothioate
  modified_base 3: mod_base = OTHER; note = 2'-O-methylcytidine-3'-phosphate
  modified_base 4: mod_base = OTHER; note = 2'-O-methylguanosine-3'-phosphate
  modified_base 5: mod_base = OTHER; note = 2'-O-methyladenosine-3'-phosphate
  modified_base 6: mod_base = OTHER; note = 2'-O-hexadecyl-uridine-3'-phosphate
  modified_base 7: mod_base = OTHER; note = 2'-deoxy-2'-fluorocytidine-3'-phosphate
  modified_base 8: mod_base = OTHER; note = 2'-O-methyluridine-3'-phosphate
  modified_base 9: mod_base = OTHER; note = 2'-deoxy-2'-fluorouridine-3'-phosphate
  modified_base 10: mod_base = OTHER; note = 2'-deoxy-2'-fluorocytidine-3'-phosphate
  modified_base 11: mod_base = OTHER; note = 2'-deoxy-2'-fluorouridine-3'-phosphate
  modified_base 12: mod_base = OTHER; note = 2'-O-methyladenosine-3'-phosphate
  modified_base 13: mod_base = OTHER; note = 2'-O-methyluridine-3'-phosphate
  modified_base 14: mod_base = OTHER; note = 2'-O-methyladenosine-3'-phosphate
  modified_base 15: mod_base = OTHER; note = 2'-O-methyladenosine-3'-phosphate
  modified_base 16: mod_base = OTHER; note = 2'-O-methyluridine-3'-phosphate
  modified_base 17: mod_base = OTHER; note = 2'-O-methylguanosine-3'-phosphate
  modified_base 18: mod_base = OTHER; note = 2'-O-methyladenosine-3'-phosphate
  modified_base 19: mod_base = OTHER; note = 2'-O-methylguanosine-3'-phosphate
  modified_base 20: mod_base = OTHER; note = 2'-O-methyluridine-3'-phosphate
  modified_base 21: mod_base = OTHER; note = 2'-O-methyladenosine-3'-phosphate ((2S,4R)-1-[29-[[2-(acetylamino)-2-deoxy-beta-D-galactopyra nosyl]oxy]-14,14-bis[[3-[[3-[[5-[[2-(acetylamino)-2-deoxy-b eta-D-galactopyranosyl]oxy]-1-oxopentyl]amino]propyl]amino] -3-oxopropoxy]methyl]-1,12,19,25-tetraoxo-16-oxa-13,20,24-t riazanonacos-1-yl]-4-hydroxy-2-pyrrolidinyl)methyl ester
cacgatcttctataatgagta

SEQ ID NO: 998 - RNA, 21 nt, synthetic construct
  source 1..21: mol_type = other RNA
  modified_base 1: mod_base = OTHER; note = 2'-O-methyluridine-3'-phosphorothioate
  modified_base 2: mod_base = OTHER; note = 2'-O-methylcytidine-3'-phosphorothioate
  modified_base 3: mod_base = OTHER; note = 2'-O-methylguanosine-3'-phosphate
  modified_base 4: mod_base = OTHER; note = 2'-O-methyluridine-3'-phosphate
  modified_base 5: mod_base = OTHER; note = 2'-O-methylguanosine-3'-phosphate
  modified_base 6: mod_base = OTHER; note = 2'-O-hexadecyl-adenosine-3'-phosphate
  modified_base 7: mod_base = OTHER; note = 2'-deoxy-2'-fluoroadenosine-3'-phosphate
  modified_base 8: mod_base = OTHER; note = 2'-O-methylcytidine-3'-phosphate
  modified_base 9: mod_base = OTHER; note = 2'-deoxy-2'-fluorouridine-3'-phosphate
  modified_base 10: mod_base = OTHER; note = 2'-deoxy-2'-fluoroadenosine-3'-phosphate
  modified_base 11: mod_base = OTHER; note = 2'-deoxy-2'-fluoroguanosine-3'-phosphate
  modified_base 12: mod_base = OTHER; note = 2'-O-methyladenosine-3'-phosphate
  modified_base 13: mod_base = OTHER; note = 2'-O-methyluridine-3'-phosphate
  modified_base 14: mod_base = OTHER; note = 2'-O-methylcytidine-3'-phosphate
  modified_base 15: mod_base = OTHER; note = 2'-O-methylguanosine-3'-phosphate
  modified_base 16: mod_base = OTHER; note = 2'-O-methyladenosine-3'-phosphate
  modified_base 17: mod_base = OTHER; note = 2'-O-methyladenosine-3'-phosphate
  modified_base 18: mod_base = OTHER; note = 2'-O-methylguanosine-3'-phosphate
  modified_base 19: mod_base = OTHER; note = 2'-O-methylcytidine-3'-phosphate
  modified_base 20: mod_base = OTHER; note = 2'-O-methyladenosine-3'-phosphate
  modified_base 21: mod_base = OTHER; note = 2'-O-methyladenosine-3'-phosphate ((2S,4R)-1-[29-[[2-(acetylamino)-2-deoxy-beta-D-galactopyra nosyl]oxy]-14,14-bis[[3-[[3-[[5-[[2-(acetylamino)-2-deoxy-b eta-D-galactopyranosyl]oxy]-1-oxopentyl]amino]propyl]amino] -3-oxopropoxy]methyl]-1,12,19,25-tetraoxo-16-oxa-13,20,24-t riazanonacos-1-yl]-4-hydroxy-2-pyrrolidinyl)methyl ester
tcgtgaactagatcgaagcaa

SEQ ID NO: 999 - RNA, 21 nt, synthetic construct
  source 1..21: mol_type = other RNA
  modified_base 1: mod_base = OTHER; note = 2'-O-methyluridine-3'-phosphorothioate
  modified_base 2: mod_base = OTHER; note = 2'-O-methylguanosine-3'-phosphorothioate
  modified_base 3: mod_base = OTHER; note = 2'-O-methylcytidine-3'-phosphate
  modified_base 4: mod_base = OTHER; note = 2'-O-methyluridine-3'-phosphate
  modified_base 5: mod_base = OTHER; note = 2'-O-methylguanosine-3'-phosphate
  modified_base 6: mod_base = OTHER; note = 2'-O-hexadecyl-cytidine-3'-phosphate
  modified_base 7: mod_base = OTHER; note = 2'-deoxy-2'-fluorouridine-3'-phosphate
  modified_base 8: mod_base = OTHER; note = 2'-O-methyluridine-3'-phosphate
  modified_base 9: mod_base = OTHER; note = 2'-deoxy-2'-fluoroadenosine-3'-phosphate
  modified_base 10: mod_base = OTHER; note = 2'-deoxy-2'-fluoroadenosine-3'-phosphate
  modified_base 11: mod_base = OTHER; note = 2'-deoxy-2'-fluorouridine-3'-phosphate
  modified_base 12: mod_base = OTHER; note = 2'-O-methylcytidine-3'-phosphate
  modified_base 13: mod_base = OTHER; note = 2'-O-methylcytidine-3'-phosphate
  modified_base 14: mod_base = OTHER; note = 2'-O-methylguanosine-3'-phosphate
  modified_base 15: mod_base = OTHER; note = 2'-O-methyladenosine-3'-phosphate
  modified_base 16: mod_base = OTHER; note = 2'-O-methyluridine-3'-phosphate
  modified_base 17: mod_base = OTHER; note = 2'-O-methylcytidine-3'-phosphate
  modified_base 18: mod_base = OTHER; note = 2'-O-methyladenosine-3'-phosphate
  modified_base 19: mod_base = OTHER; note = 2'-O-methylguanosine-3'-phosphate
  modified_base 20: mod_base = OTHER; note = 2'-O-methyluridine-3'-phosphate
  modified_base 21: mod_base = OTHER; note = 2'-O-methyladenosine-3'-phosphate ((2S,4R)-1-[29-[[2-(acetylamino)-2-deoxy-beta-D-galactopyra nosyl]oxy]-14,14-bis[[3-[[3-[[5-[[2-(acetylamino)-2-deoxy-b eta-D-galactopyranosyl]oxy]-1-oxopentyl]amino]propyl]amino] -3-oxopropoxy]methyl]-1,12,19,25-tetraoxo-16-oxa-13,20,24-t riazanonacos-1-yl]-4-hydroxy-2-pyrrolidinyl)methyl ester
tgctgcttaatccgatcagta

SEQ ID NO: 1000 - RNA, 21 nt, synthetic construct
  source 1..21: mol_type = other RNA
  modified_base 1: mod_base = OTHER; note = 2'-O-methyladenosine-3'-phosphorothioate
  modified_base 2: mod_base = OTHER; note = 2'-O-methyluridine-3'-phosphorothioate
  modified_base 3: mod_base = OTHER; note = 2'-O-methylcytidine-3'-phosphate
  modified_base 4: mod_base = OTHER; note = 2'-O-methylcytidine-3'-phosphate
  modified_base 5: mod_base = OTHER; note = 2'-O-methylguanosine-3'-phosphate
  modified_base 6: mod_base = OTHER; note = 2'-O-hexadecyl-adenosine-3'-phosphate
  modified_base 7: mod_base = OTHER; note = 2'-deoxy-2'-fluorouridine-3'-phosphate
  modified_base 8: mod_base = OTHER; note = 2'-O-methylcytidine-3'-phosphate
  modified_base 9: mod_base = OTHER; note = 2'-deoxy-2'-fluoroadenosine-3'-phosphate
  modified_base 10: mod_base = OTHER; note = 2'-deoxy-2'-fluoroguanosine-3'-phosphate
  modified_base 11: mod_base = OTHER; note = 2'-deoxy-2'-fluorouridine-3'-phosphate
  modified_base 12: mod_base = OTHER; note = 2'-O-methylguanosine-3'-phosphate
  modified_base 13: mod_base = OTHER; note = 2'-O-methyluridine-3'-phosphate
  modified_base 14: mod_base = OTHER; note = 2'-O-methylcytidine-3'-phosphate
  modified_base 15: mod_base = OTHER; note = 2'-O-methyluridine-3'-phosphate
  modified_base 16: mod_base = OTHER; note = 2'-O-methyluridine-3'-phosphate
  modified_base 17: mod_base = OTHER; note = 2'-O-methyluridine-3'-phosphate
  modified_base 18: mod_base = OTHER; note = 2'-O-methyladenosine-3'-phosphate
  modified_base 19: mod_base = OTHER; note = 2'-O-methyluridine-3'-phosphate
  modified_base 20: mod_base = OTHER; note = 2'-O-methylguanosine-3'-phosphate
  modified_base 21: mod_base = OTHER; note = 2'-O-methyladenosine-3'-phosphate ((2S,4R)-1-[29-[[2-(acetylamino)-2-deoxy-beta-D-galactopyra nosyl]oxy]-14,14-bis[[3-[[3-[[5-[[2-(acetylamino)-2-deoxy-b eta-D-galactopyranosyl]oxy]-1-oxopentyl]amino]propyl]amino] -3-oxopropoxy]methyl]-1,12,19,25-tetraoxo-16-oxa-13,20,24-t riazanonacos-1-yl]-4-hydroxy-2-pyrrolidinyl)methyl ester
atccgatcagtgtctttatga

SEQ ID NO: 1001 - RNA, 21 nt, synthetic construct
  source 1..21: mol_type = other RNA
  modified_base 1: mod_base = OTHER; note = 2'-O-methyluridine-3'-phosphorothioate
  modified_base 2: mod_base = OTHER; note = 2'-O-methylcytidine-3'-phosphorothioate
  modified_base 3: mod_base = OTHER; note = 2'-O-methylcytidine-3'-phosphate
  modified_base 4: mod_base = OTHER; note = 2'-O-methylguanosine-3'-phosphate
  modified_base 5: mod_base = OTHER; note = 2'-O-methyladenosine-3'-phosphate
  modified_base 6: mod_base = OTHER; note = 2'-O-hexadecyl-uridine-3'-phosphate
  modified_base 7: mod_base = OTHER; note = 2'-deoxy-2'-fluorocytidine-3'-phosphate
  modified_base 8: mod_base = OTHER; note = 2'-O-methyladenosine-3'-phosphate
  modified_base 9: mod_base = OTHER; note = 2'-deoxy-2'-fluoroguanosine-3'-phosphate
  modified_base 10: mod_base = OTHER; note = 2'-deoxy-2'-fluorouridine-3'-phosphate
  modified_base 11: mod_base = OTHER; note = 2'-deoxy-2'-fluoroguanosine-3'-phosphate
  modified_base 12: mod_base = OTHER; note = 2'-O-methyluridine-3'-phosphate
  modified_base 13: mod_base = OTHER; note = 2'-O-methylcytidine-3'-phosphate
  modified_base 14: mod_base = OTHER; note = 2'-O-methyluridine-3'-phosphate
  modified_base 15: mod_base = OTHER; note = 2'-O-methyluridine-3'-phosphate
  modified_base 16: mod_base = OTHER; note = 2'-O-methyluridine-3'-phosphate
  modified_base 17: mod_base = OTHER; note = 2'-O-methyladenosine-3'-phosphate
  modified_base 18: mod_base = OTHER; note = 2'-O-methyluridine-3'-phosphate
  modified_base 19: mod_base = OTHER; note = 2'-O-methylguanosine-3'-phosphate
  modified_base 20: mod_base = OTHER; note = 2'-O-methyladenosine-3'-phosphate
  modified_base 21: mod_base = OTHER; note = 2'-O-methyladenosine-3'-phosphate ((2S,4R)-1-[29-[[2-(acetylamino)-2-deoxy-beta-D-galactopyra nosyl]oxy]-14,14-bis[[3-[[3-[[5-[[2-(acetylamino)-2-deoxy-b eta-D-galactopyranosyl]oxy]-1-oxopentyl]amino]propyl]amino] -3-oxopropoxy]methyl]-1,12,19,25-tetraoxo-16-oxa-13,20,24-t riazanonacos-1-yl]-4-hydroxy-2-pyrrolidinyl)methyl ester
tccgatcagtgtctttatgaa

SEQ ID NO: 1002 - RNA, 21 nt, synthetic construct
  source 1..21: mol_type = other RNA
  modified_base 1: mod_base = OTHER; note = 2'-O-methylguanosine-3'-phosphorothioate
  modified_base 2: mod_base = OTHER; note = 2'-O-methyladenosine-3'-phosphorothioate
  modified_base 3: mod_base = OTHER; note = 2'-O-methyladenosine-3'-phosphate
  modified_base 4: mod_base = OTHER; note = 2'-O-methylcytidine-3'-phosphate
  modified_base 5: mod_base = OTHER; note = 2'-O-methyluridine-3'-phosphate
  modified_base 6: mod_base = OTHER; note = 2'-O-hexadecyl-uridine-3'-phosphate
  modified_base 7: mod_base = OTHER; note = 2'-deoxy-2'-fluorouridine-3'-phosphate
  modified_base 8: mod_base = OTHER; note = 2'-O-methyluridine-3'-phosphate
  modified_base 9: mod_base = OTHER; note = 2'-deoxy-2'-fluorouridine-3'-phosphate
  modified_base 10: mod_base = OTHER; note = 2'-deoxy-2'-fluorocytidine-3'-phosphate
  modified_base 11: mod_base = OTHER; note = 2'-deoxy-2'-fluorocytidine-3'-phosphate
  modified_base 12: mod_base = OTHER; note = 2'-O-methyluridine-3'-phosphate
  modified_base 13: mod_base = OTHER; note = 2'-O-methylcytidine-3'-phosphate
  modified_base 14: mod_base = OTHER; note = 2'-O-methyladenosine-3'-phosphate
  modified_base 15: mod_base = OTHER; note = 2'-O-methylguanosine-3'-phosphate
  modified_base 16: mod_base = OTHER; note = 2'-O-methylguanosine-3'-phosphate
  modified_base 17: mod_base = OTHER; note = 2'-O-methyladenosine-3'-phosphate
  modified_base 18: mod_base = OTHER; note = 2'-O-methyladenosine-3'-phosphate
  modified_base 19: mod_base = OTHER; note = 2'-O-methylcytidine-3'-phosphate
  modified_base 20: mod_base = OTHER; note = 2'-O-methylguanosine-3'-phosphate
  modified_base 21: mod_base = OTHER; note = 2'-O-methyladenosine-3'-phosphate ((2S,4R)-1-[29-[[2-(acetylamino)-2-deoxy-beta-D-galactopyra nosyl]oxy]-14,14-bis[[3-[[3-[[5-[[2-(acetylamino)-2-deoxy-b eta-D-galactopyranosyl]oxy]-1-oxopentyl]amino]propyl]amino] -3-oxopropoxy]methyl]-1,12,19,25-tetraoxo-16-oxa-13,20,24-t riazanonacos-1-yl]-4-hydroxy-2-pyrrolidinyl)methyl ester
gaactttttcctcaggaacga

SEQ ID NO: 1003 - RNA, 21 nt, synthetic construct
  source 1..21: mol_type = other RNA
  modified_base 1: mod_base = OTHER; note = 2'-O-methyladenosine-3'-phosphorothioate
  modified_base 2: mod_base = OTHER; note = 2'-O-methyladenosine-3'-phosphorothioate
  modified_base 3: mod_base = OTHER; note = 2'-O-methylcytidine-3'-phosphate
  modified_base 4: mod_base = OTHER; note = 2'-O-methyluridine-3'-phosphate
  modified_base 5: mod_base = OTHER; note = 2'-O-methyluridine-3'-phosphate
  modified_base 6: mod_base = OTHER; note = 2'-O-hexadecyl-uridine-3'-phosphate
  modified_base 7: mod_base = OTHER; note = 2'-deoxy-2'-fluorouridine-3'-phosphate
  modified_base 8: mod_base = OTHER; note = 2'-O-methyluridine-3'-phosphate
  modified_base 9: mod_base = OTHER; note = 2'-deoxy-2'-fluorocytidine-3'-phosphate
  modified_base 10: mod_base = OTHER; note = 2'-deoxy-2'-fluorocytidine-3'-phosphate
  modified_base 11: mod_base = OTHER; note = 2'-deoxy-2'-fluorouridine-3'-phosphate
  modified_base 12: mod_base = OTHER; note = 2'-O-methylcytidine-3'-phosphate
  modified_base 13: mod_base = OTHER; note = 2'-O-methyladenosine-3'-phosphate
  modified_base 14: mod_base = OTHER; note = 2'-O-methylguanosine-3'-phosphate
  modified_base 15: mod_base = OTHER; note = 2'-O-methylguanosine-3'-phosphate
  modified_base 16: mod_base = OTHER; note = 2'-O-methyladenosine-3'-phosphate
  modified_base 17: mod_base = OTHER; note = 2'-O-methyladenosine-3'-phosphate
  modified_base 18: mod_base = OTHER; note = 2'-O-methylcytidine-3'-phosphate
  modified_base 19: mod_base = OTHER; note = 2'-O-methylguanosine-3'-phosphate
  modified_base 20: mod_base = OTHER; note = 2'-O-methyladenosine-3'-phosphate
  modified_base 21: mod_base = OTHER; note = 2'-O-methyladenosine-3'-phosphate ((2S,4R)-1-[29-[[2-(acetylamino)-2-deoxy-beta-D-galactopyra nosyl]oxy]-14,14-bis[[3-[[3-[[5-[[2-(acetylamino)-2-deoxy-b eta-D-galactopyranosyl]oxy]-1-oxopentyl]amino]propyl]amino] -3-oxopropoxy]methyl]-1,12,19,25-tetraoxo-16-oxa-13,20,24-t riazanonacos-1-yl]-4-hydroxy-2-pyrrolidinyl)methyl ester
aactttttcctcaggaacgaa

SEQ ID NO: 1004 - RNA, 21 nt, synthetic construct
  source 1..21: mol_type = other RNA
  modified_base 1: mod_base = OTHER; note = 2'-O-methylguanosine-3'-phosphorothioate
  modified_base 2: mod_base = OTHER; note = 2'-O-methyladenosine-3'-phosphorothioate
  modified_base 3: mod_base = OTHER; note = 2'-O-methylguanosine-3'-phosphate
  modified_base 4: mod_base = OTHER; note = 2'-O-methyladenosine-3'-phosphate
  modified_base 5: mod_base = OTHER; note = 2'-O-methyluridine-3'-phosphate
  modified_base 6: mod_base = OTHER; note = 2'-O-hexadecyl-uridine-3'-phosphate
  modified_base 7: mod_base = OTHER; note = 2'-deoxy-2'-fluorocytidine-3'-phosphate
  modified_base 8: mod_base = OTHER; note = 2'-O-methyladenosine-3'-phosphate
  modified_base 9: mod_base = OTHER; note = 2'-deoxy-2'-fluoroguanosine-3'-phosphate
  modified_base 10: mod_base = OTHER; note = 2'-deoxy-2'-fluorouridine-3'-phosphate
  modified_base 11: mod_base = OTHER; note = 2'-deoxy-2'-fluorouridine-3'-phosphate
  modified_base 12: mod_base = OTHER; note = 2'-O-methylcytidine-3'-phosphate
  modified_base 13: mod_base = OTHER; note = 2'-O-methyluridine-3'-phosphate
  modified_base 14: mod_base = OTHER; note = 2'-O-methyluridine-3'-phosphate
  modified_base 15: mod_base = OTHER; note = 2'-O-methylcytidine-3'-phosphate
  modified_base 16: mod_base = OTHER; note = 2'-O-methyladenosine-3'-phosphate
  modified_base 17: mod_base = OTHER; note = 2'-O-methyladenosine-3'-phosphate
  modified_base 18: mod_base = OTHER; note = 2'-O-methyluridine-3'-phosphate
  modified_base 19: mod_base = OTHER; note = 2'-O-methylguanosine-3'-phosphate
  modified_base 20: mod_base = OTHER; note = 2'-O-methylguanosine-3'-phosphate
  modified_base 21: mod_base = OTHER; note = 2'-O-methyladenosine-3'-phosphate ((2S,4R)-1-[29-[[2-(acetylamino)-2-deoxy-beta-D-galactopyra nosyl]oxy]-14,14-bis[[3-[[3-[[5-[[2-(acetylamino)-2-deoxy-b eta-D-galactopyranosyl]oxy]-1-oxopentyl]amino]propyl]amino] -3-oxopropoxy]methyl]-1,12,19,25-tetraoxo-16-oxa-13,20,24-t riazanonacos-1-yl]-4-hydroxy-2-pyrrolidinyl)methyl ester
gagattcagttcttcaatgga

SEQ ID NO: 1005 - RNA, 21 nt, synthetic construct
  source 1..21: mol_type = other RNA
  modified_base 1: mod_base = OTHER; note = 2'-O-methylcytidine-3'-phosphorothioate
  modified_base 2: mod_base = OTHER; note = 2'-O-methyladenosine-3'-phosphorothioate
  modified_base 3: mod_base = OTHER; note = 2'-O-methyluridine-3'-phosphate
  modified_base 4: mod_base = OTHER; note = 2'-O-methyluridine-3'-phosphate
  modified_base 5: mod_base = OTHER; note = 2'-O-methylguanosine-3'-phosphate
  modified_base 6: mod_base = OTHER; note = 2'-O-hexadecyl-cytidine-3'-phosphate
  modified_base 7: mod_base = OTHER; note = 2'-deoxy-2'-fluorouridine-3'-phosphate
  modified_base 8: mod_base = OTHER; note = 2'-O-methylcytidine-3'-phosphate
  modified_base 9: mod_base = OTHER; note = 2'-deoxy-2'-fluorouridine-3'-phosphate
  modified_base 10: mod_base = OTHER; note = 2'-deoxy-2'-fluoroguanosine-3'-phosphate
  modified_base 11: mod_base = OTHER; note = 2'-deoxy-2'-fluoroadenosine-3'-phosphate
  modified_base 12: mod_base = OTHER; note = 2'-O-methyladenosine-3'-phosphate
  modified_base 13: mod_base = OTHER; note = 2'-O-methylcytidine-3'-phosphate
  modified_base 14: mod_base = OTHER; note = 2'-O-methyluridine-3'-phosphate
  modified_base 15: mod_base = OTHER; note = 2'-O-methyladenosine-3'-phosphate
  modified_base 16: mod_base = OTHER; note = 2'-O-methylcytidine-3'-phosphate
  modified_base 17: mod_base = OTHER; note = 2'-O-methyladenosine-3'-phosphate
  modified_base 18: mod_base = OTHER; note = 2'-O-methylcytidine-3'-phosphate
  modified_base 19: mod_base = OTHER; note = 2'-O-methylcytidine-3'-phosphate
  modified_base 20: mod_base = OTHER; note = 2'-O-methyluridine-3'-phosphate
  modified_base 21: mod_base = OTHER; note = 2'-O-methyladenosine-3'-phosphate ((2S,4R)-1-[29-[[2-(acetylamino)-2-deoxy-beta-D-galactopyra nosyl]oxy]-14,14-bis[[3-[[3-[[5-[[2-(acetylamino)-2-deoxy-b eta-D-galactopyranosyl]oxy]-1-oxopentyl]amino]propyl]amino] -3-oxopropoxy]methyl]-1,12,19,25-tetraoxo-16-oxa-13,20,24-t riazanonacos-1-yl]-4-hydroxy-2-pyrrolidinyl)methyl ester
cattgctctgaactacaccta

SEQ ID NO: 1006 - RNA, 21 nt, synthetic construct
  source 1..21: mol_type = other RNA
  modified_base 1: mod_base = OTHER; note = 2'-O-methyladenosine-3'-phosphorothioate
  modified_base 2: mod_base = OTHER; note = 2'-O-methyluridine-3'-phosphorothioate
  modified_base 3: mod_base = OTHER; note = 2'-O-methyluridine-3'-phosphate
  modified_base 4: mod_base = OTHER; note = 2'-O-methylguanosine-3'-phosphate
  modified_base 5: mod_base = OTHER; note = 2'-O-methylcytidine-3'-phosphate
  modified_base 6: mod_base = OTHER; note = 2'-O-hexadecyl-uridine-3'-phosphate
  modified_base 7: mod_base = OTHER; note = 2'-deoxy-2'-fluorocytidine-3'-phosphate
  modified_base 8: mod_base = OTHER; note = 2'-O-methyluridine-3'-phosphate
  modified_base 9: mod_base = OTHER; note = 2'-deoxy-2'-fluoroguanosine-3'-phosphate
  modified_base 10: mod_base = OTHER; note = 2'-deoxy-2'-fluoroadenosine-3'-phosphate
  modified_base 11: mod_base = OTHER; note = 2'-deoxy-2'-fluoroadenosine-3'-phosphate
  modified_base 12: mod_base = OTHER; note = 2'-O-methylcytidine-3'-phosphate
  modified_base 13: mod_base = OTHER; note = 2'-O-methyluridine-3'-phosphate
  modified_base 14: mod_base = OTHER; note = 2'-O-methyladenosine-3'-phosphate
  modified_base 15: mod_base = OTHER; note = 2'-O-methylcytidine-3'-phosphate
  modified_base 16: mod_base = OTHER; note = 2'-O-methyladenosine-3'-phosphate
  modified_base 17: mod_base = OTHER; note = 2'-O-methylcytidine-3'-phosphate
  modified_base 18: mod_base = OTHER; note = 2'-O-methylcytidine-3'-phosphate
  modified_base 19: mod_base = OTHER; note = 2'-O-methyluridine-3'-phosphate
  modified_base 20: mod_base = OTHER; note = 2'-O-methyluridine-3'-phosphate
  modified_base 21: mod_base = OTHER; note = 2'-O-methyladenosine-3'-phosphate ((2S,4R)-1-[29-[[2-(acetylamino)-2-deoxy-beta-D-galactopyra nosyl]oxy]-14,14-bis[[3-[[3-[[5-[[2-(acetylamino)-2-deoxy-b eta-D-galactopyranosyl]oxy]-1-oxopentyl]amino]propyl]amino] -3-oxopropoxy]methyl]-1,12,19,25-tetraoxo-16-oxa-13,20,24-t riazanonacos-1-yl]-4-hydroxy-2-pyrrolidinyl)methyl ester
attgctctgaactacacctta

SEQ ID NO: 1007 - RNA, 21 nt, synthetic construct
  source 1..21: mol_type = other RNA
  modified_base 1: mod_base = OTHER; note = 2'-O-methylcytidine-3'-phosphorothioate
  modified_base 2: mod_base = OTHER; note = 2'-O-methyluridine-3'-phosphorothioate
  modified_base 3: mod_base = OTHER; note = 2'-O-methylguanosine-3'-phosphate
  modified_base 4: mod_base = OTHER; note = 2'-O-methyladenosine-3'-phosphate
  modified_base 5: mod_base = OTHER; note = 2'-O-methyladenosine-3'-phosphate
  modified_base 6: mod_base = OTHER; note = 2'-O-hexadecyl-cytidine-3'-phosphate
  modified_base 7: mod_base = OTHER; note = 2'-deoxy-2'-fluorouridine-3'-phosphate
  modified_base 8: mod_base = OTHER; note = 2'-O-methyladenosine-3'-phosphate
  modified_base 9: mod_base = OTHER; note = 2'-deoxy-2'-fluorocytidine-3'-phosphate
  modified_base 10: mod_base = OTHER; note = 2'-deoxy-2'-fluoroadenosine-3'-phosphate
  modified_base 11: mod_base = OTHER; note = 2'-deoxy-2'-fluorocytidine-3'-phosphate
  modified_base 12: mod_base = OTHER; note = 2'-O-methylcytidine-3'-phosphate
  modified_base 13: mod_base = OTHER; note = 2'-O-methyluridine-3'-phosphate
  modified_base 14: mod_base = OTHER; note = 2'-O-methyluridine-3'-phosphate
  modified_base 15: mod_base = OTHER; note = 2'-O-methylcytidine-3'-phosphate
  modified_base 16: mod_base = OTHER; note = 2'-O-methyluridine-3'-phosphate
  modified_base 17: mod_base = OTHER; note = 2'-O-methyladenosine-3'-phosphate
  modified_base 18: mod_base = OTHER; note = 2'-O-methylcytidine-3'-phosphate
  modified_base 19: mod_base = OTHER; note = 2'-O-methylcytidine-3'-phosphate
  modified_base 20: mod_base = OTHER; note = 2'-O-methyladenosine-3'-phosphate
  modified_base 21: mod_base = OTHER; note = 2'-O-methyladenosine-3'-phosphate ((2S,4R)-1-[29-[[2-(acetylamino)-2-deoxy-beta-D-galactopyra nosyl]oxy]-14,14-bis[[3-[[3-[[5-[[2-(acetylamino)-2-deoxy-b eta-D-galactopyranosyl]oxy]-1-oxopentyl]amino]propyl]amino] -3-oxopropoxy]methyl]-1,12,19,25-tetraoxo-16-oxa-13,20,24-t riazanonacos-1-yl]-4-hydroxy-2-pyrrolidinyl)methyl ester
ctgaactacaccttctaccaa

SEQ ID NO: 1008 - RNA, 21 nt, synthetic construct
  source 1..21: mol_type = other RNA
  modified_base 1: mod_base = OTHER; note = 2'-O-methyluridine-3'-phosphorothioate
  modified_base 2: mod_base = OTHER; note = 2'-O-methylguanosine-3'-phosphorothioate
  modified_base 3: mod_base = OTHER; note = 2'-O-methylcytidine-3'-phosphate
  modified_base 4: mod_base = OTHER; note = 2'-O-methyluridine-3'-phosphate
  modified_base 5: mod_base = OTHER; note = 2'-O-methyladenosine-3'-phosphate
  modified_base 6: mod_base = OTHER; note = 2'-O-hexadecyl-cytidine-3'-phosphate
  modified_base 7: mod_base = OTHER; note = 2'-deoxy-2'-fluorouridine-3'-phosphate
  modified_base 8: mod_base = OTHER; note = 2'-O-methyluridine-3'-phosphate
  modified_base 9: mod_base = OTHER; note = 2'-deoxy-2'-fluorocytidine-3'-phosphate
  modified_base 10: mod_base = OTHER; note = 2'-deoxy-2'-fluoroguanosine-3'-phosphate
  modified_base 11: mod_base = OTHER; note = 2'-deoxy-2'-fluorocytidine-3'-phosphate
  modified_base 12: mod_base = OTHER; note = 2'-O-methyluridine-3'-phosphate
  modified_base 13: mod_base = OTHER; note = 2'-O-methylcytidine-3'-phosphate
  modified_base 14: mod_base = OTHER; note = 2'-O-methylcytidine-3'-phosphate
  modified_base 15: mod_base = OTHER; note = 2'-O-methyluridine-3'-phosphate
  modified_base 16: mod_base = OTHER; note = 2'-O-methyluridine-3'-phosphate
  modified_base 17: mod_base = OTHER; note = 2'-O-methylguanosine-3'-phosphate
  modified_base 18: mod_base = OTHER; note = 2'-O-methylcytidine-3'-phosphate
  modified_base 19: mod_base = OTHER; note = 2'-O-methyladenosine-3'-phosphate
  modified_base 20: mod_base = OTHER; note = 2'-O-methylguanosine-3'-phosphate
  modified_base 21: mod_base = OTHER; note = 2'-O-methyladenosine-3'-phosphate ((2S,4R)-1-[29-[[2-(acetylamino)-2-deoxy-beta-D-galactopyra nosyl]oxy]-14,14-bis[[3-[[3-[[5-[[2-(acetylamino)-2-deoxy-b eta-D-galactopyranosyl]oxy]-1-oxopentyl]amino]propyl]amino] -3-oxopropoxy]methyl]-1,12,19,25-tetraoxo-16-oxa-13,20,24-t riazanonacos-1-yl]-4-hydroxy-2-pyrrolidinyl)methyl ester
tgctacttcgctccttgcaga

SEQ ID NO: 1009 - RNA, 21 nt, synthetic construct
  source 1..21: mol_type = other RNA
  modified_base 1: mod_base = OTHER; note = 2'-O-methyluridine-3'-phosphorothioate
  modified_base 2: mod_base = OTHER; note = 2'-O-methylguanosine-3'-phosphorothioate
  modified_base 3: mod_base = OTHER; note = 2'-O-methylcytidine-3'-phosphate
  modified_base 4: mod_base = OTHER; note = 2'-O-methyladenosine-3'-phosphate
  modified_base 5: mod_base = OTHER; note = 2'-O-methylguanosine-3'-phosphate
  modified_base 6: mod_base = OTHER; note = 2'-O-hexadecyl-adenosine-3'-phosphate
  modified_base 7: mod_base = OTHER; note = 2'-deoxy-2'-fluoroadenosine-3'-phosphate
  modified_base 8: mod_base = OTHER; note = 2'-O-methylcytidine-3'-phosphate
  modified_base 9: mod_base = OTHER; note = 2'-deoxy-2'-fluorocytidine-3'-phosphate
  modified_base 10: mod_base = OTHER; note = 2'-deoxy-2'-fluoroguanosine-3'-phosphate
  modified_base 11: mod_base = OTHER; note = 2'-deoxy-2'-fluorouridine-3'-phosphate
  modified_base 12: mod_base = OTHER; note = 2'-O-methyluridine-3'-phosphate
  modified_base 13: mod_base = OTHER; note = 2'-O-methylguanosine-3'-phosphate
  modified_base 14: mod_base = OTHER; note = 2'-O-methyluridine-3'-phosphate
  modified_base 15: mod_base = OTHER; note = 2'-O-methylcytidine-3'-phosphate
  modified_base 16: mod_base = OTHER; note = 2'-O-methyluridine-3'-phosphate
  modified_base 17: mod_base = OTHER; note = 2'-O-methyluridine-3'-phosphate
  modified_base 18: mod_base = OTHER; note = 2'-O-methylguanosine-3'-phosphate
  modified_base 19: mod_base = OTHER; note = 2'-O-methyluridine-3'-phosphate
  modified_base 20: mod_base = OTHER; note = 2'-O-methyluridine-3'-phosphate
  modified_base 21: mod_base = OTHER; note = 2'-O-methyladenosine-3'-phosphate ((2S,4R)-1-[29-[[2-(acetylamino)-2-deoxy-beta-D-galactopyra nosyl]oxy]-14,14-bis[[3-[[3-[[5-[[2-(acetylamino)-2-deoxy-b eta-D-galactopyranosyl]oxy]-1-oxopentyl]amino]propyl]amino] -3-oxopropoxy]methyl]-1,12,19,25-tetraoxo-16-oxa-13,20,24-t riazanonacos-1-yl]-4-hydroxy-2-pyrrolidinyl)methyl ester
tgcagaaccgttgtcttgtta

SEQ ID NO: 1010 - RNA, 21 nt, synthetic construct
  source 1..21: mol_type = other RNA
  modified_base 1: mod_base = OTHER; note = 2'-O-methyluridine-3'-phosphorothioate
  modified_base 2: mod_base = OTHER; note = 2'-O-methyluridine-3'-phosphorothioate
  modified_base 3: mod_base = OTHER; note = 2'-O-methylguanosine-3'-phosphate
  modified_base 4: mod_base = OTHER; note = 2'-O-methyluridine-3'-phosphate
  modified_base 5: mod_base = OTHER; note = 2'-O-methyluridine-3'-phosphate
  modified_base 6: mod_base = OTHER; note = 2'-O-hexadecyl-cytidine-3'-phosphate
  modified_base 7: mod_base = OTHER; note = 2'-deoxy-2'-fluorocytidine-3'-phosphate
  modified_base 8: mod_base = OTHER; note = 2'-O-methyluridine-3'-phosphate
  modified_base 9: mod_base = OTHER; note = 2'-deoxy-2'-fluoroguanosine-3'-phosphate
  modified_base 10: mod_base = OTHER; note = 2'-deoxy-2'-fluoroguanosine-3'-phosphate
  modified_base 11: mod_base = OTHER; note = 2'-deoxy-2'-fluorocytidine-3'-phosphate
  modified_base 12: mod_base = OTHER; note = 2'-O-methyluridine-3'-phosphate
  modified_base 13: mod_base = OTHER; note = 2'-O-methyladenosine-3'-phosphate
  modified_base 14: mod_base = OTHER; note = 2'-O-methylcytidine-3'-phosphate
  modified_base 15: mod_base = OTHER; note = 2'-O-methyluridine-3'-phosphate
  modified_base 16: mod_base = OTHER; note = 2'-O-methyladenosine-3'-phosphate
  modified_base 17: mod_base = OTHER; note = 2'-O-methyluridine-3'-phosphate
  modified_base 18: mod_base = OTHER; note = 2'-O-methyluridine-3'-phosphate
  modified_base 19: mod_base = OTHER; note = 2'-O-methylcytidine-3'-phosphate
  modified_base 20: mod_base = OTHER; note = 2'-O-methyluridine-3'-phosphate
  modified_base 21: mod_base = OTHER; note = 2'-O-methyladenosine-3'-phosphate ((2S,4R)-1-[29-[[2-(acetylamino)-2-deoxy-beta-D-galactopyra nosyl]oxy]-14,14-bis[[3-[[3-[[5-[[2-(acetylamino)-2-deoxy-b eta-D-galactopyranosyl]oxy]-1-oxopentyl]amino]propyl]amino] -3-oxopropoxy]methyl]-1,12,19,25-tetraoxo-16-oxa-13,20,24-t riazanonacos-1-yl]-4-hydroxy-2-pyrrolidinyl)methyl ester
ttgttcctggctactattcta

SEQ ID NO: 1011 - RNA, 21 nt, synthetic construct
  source 1..21: mol_type = other RNA
  modified_base 1: mod_base = OTHER; note = 2'-O-methylguanosine-3'-phosphorothioate
  modified_base 2: mod_base = OTHER; note = 2'-O-methyluridine-3'-phosphorothioate
  modified_base 3: mod_base = OTHER; note = 2'-O-methyluridine-3'-phosphate
  modified_base 4: mod_base = OTHER; note = 2'-O-methylcytidine-3'-phosphate
  modified_base 5: mod_base = OTHER; note = 2'-O-methylcytidine-3'-phosphate
  modified_base 6: mod_base = OTHER; note = 2'-O-hexadecyl-uridine-3'-phosphate
  modified_base 7: mod_base = OTHER; note = 2'-deoxy-2'-fluoroguanosine-3'-phosphate
  modified_base 8: mod_base = OTHER; note = 2'-O-methylguanosine-3'-phosphate
  modified_base 9: mod_base = OTHER; note = 2'-deoxy-2'-fluorocytidine-3'-phosphate
  modified_base 10: mod_base = OTHER; note = 2'-deoxy-2'-fluorouridine-3'-phosphate
  modified_base 11: mod_base = OTHER; note = 2'-deoxy-2'-fluoroadenosine-3'-phosphate
  modified_base 12: mod_base = OTHER; note = 2'-O-methylcytidine-3'-phosphate
  modified_base 13: mod_base = OTHER; note = 2'-O-methyluridine-3'-phosphate
  modified_base 14: mod_base = OTHER; note = 2'-O-methyladenosine-3'-phosphate
  modified_base 15: mod_base = OTHER; note = 2'-O-methyluridine-3'-phosphate
  modified_base 16: mod_base = OTHER; note = 2'-O-methyluridine-3'-phosphate
  modified_base 17: mod_base = OTHER; note = 2'-O-methylcytidine-3'-phosphate
  modified_base 18: mod_base = OTHER; note = 2'-O-methyluridine-3'-phosphate
  modified_base 19: mod_base = OTHER; note = 2'-O-methyladenosine-3'-phosphate
  modified_base 20: mod_base = OTHER; note = 2'-O-methylcytidine-3'-phosphate
  modified_base 21: mod_base = OTHER; note = 2'-O-methyladenosine-3'-phosphate ((2S,4R)-1-[29-[[2-(acetylamino)-2-deoxy-beta-D-galactopyra nosyl]oxy]-14,14-bis[[3-[[3-[[5-[[2-(acetylamino)-2-deoxy-b eta-D-galactopyranosyl]oxy]-1-oxopentyl]amino]propyl]amino] -3-oxopropoxy]methyl]-1,12,19,25-tetraoxo-16-oxa-13,20,24-t riazanonacos-1-yl]-4-hydroxy-2-pyrrolidinyl)methyl ester
gttcctggctactattctaca

SEQ ID NO: 1012 - RNA, 21 nt, synthetic construct
  source 1..21: mol_type = other RNA
  modified_base 1: mod_base = OTHER; note = 2'-O-methylcytidine-3'-phosphorothioate
  modified_base 2: mod_base = OTHER; note = 2'-O-methyluridine-3'-phosphorothioate
  modified_base 3: mod_base = OTHER; note = 2'-O-methylcytidine-3'-phosphate
  modified_base 4: mod_base = OTHER; note = 2'-O-methyluridine-3'-phosphate
  modified_base 5: mod_base = OTHER; note = 2'-O-methylguanosine-3'-phosphate
  modified_base 6: mod_base = OTHER; note = 2'-O-hexadecyl-guanosine-3'-phosphate
  modified_base 7: mod_base = OTHER; note = 2'-deoxy-2'-fluoroadenosine-3'-phosphate
  modified_base 8: mod_base = OTHER; note = 2'-O-methylcytidine-3'-phosphate
  modified_base 9: mod_base = OTHER; note = 2'-deoxy-2'-fluoroadenosine-3'-phosphate
  modified_base 10: mod_base = OTHER; note = 2'-deoxy-2'-fluoroguanosine-3'-phosphate
  modified_base 11: mod_base = OTHER; note = 2'-deoxy-2'-fluorouridine-3'-phosphate
  modified_base 12: mod_base = OTHER; note = 2'-O-methyluridine-3'-phosphate
  modified_base 13: mod_base = OTHER; note = 2'-O-methylguanosine-3'-phosphate
  modified_base 14: mod_base = OTHER; note = 2'-O-methylcytidine-3'-phosphate
  modified_base 15: mod_base = OTHER; note = 2'-O-methyluridine-3'-phosphate
  modified_base 16: mod_base = OTHER; note = 2'-O-methylguanosine-3'-phosphate
  modified_base 17: mod_base = OTHER; note = 2'-O-methyladenosine-3'-phosphate
  modified_base 18: mod_base = OTHER; note = 2'-O-methyluridine-3'-phosphate
  modified_base 19: mod_base = OTHER; note = 2'-O-methyluridine-3'-phosphate
  modified_base 20: mod_base = OTHER; note = 2'-O-methyladenosine-3'-phosphate
  modified_base 21: mod_base = OTHER; note = 2'-O-methyladenosine-3'-phosphate ((2S,4R)-1-[29-[[2-(acetylamino)-2-deoxy-beta-D-galactopyra nosyl]oxy]-14,14-bis[[3-[[3-[[5-[[2-(acetylamino)-2-deoxy-b eta-D-galactopyranosyl]oxy]-1-oxopentyl]amino]propyl]amino] -3-oxopropoxy]methyl]-1,12,19,25-tetraoxo-16-oxa-13,20,24-t riazanonacos-1-yl]-4-hydroxy-2-pyrrolidinyl)methyl ester
ctctggacagttgctgattaa

SEQ ID NO: 1013 - RNA, 21 nt, synthetic construct
  source 1..21: mol_type = other RNA
  modified_base 1: mod_base = OTHER; note = 2'-O-methyluridine-3'-phosphorothioate
  modified_base 2: mod_base = OTHER; note = 2'-O-methylcytidine-3'-phosphorothioate
  modified_base 3: mod_base = OTHER; note = 2'-O-methyluridine-3'-phosphate
  modified_base 4: mod_base = OTHER; note = 2'-O-methylguanosine-3'-phosphate
  modified_base 5: mod_base = OTHER; note = 2'-O-methylguanosine-3'-phosphate
  modified_base 6: mod_base = OTHER; note = 2'-O-hexadecyl-adenosine-3'-phosphate
  modified_base 7: mod_base = OTHER; note = 2'-deoxy-2'-fluorocytidine-3'-phosphate
  modified_base 8: mod_base = OTHER; note = 2'-O-methyladenosine-3'-phosphate
  modified_base 9: mod_base = OTHER; note = 2'-deoxy-2'-fluoroguanosine-3'-phosphate
  modified_base 10: mod_base = OTHER; note = 2'-deoxy-2'-fluorouridine-3'-phosphate
  modified_base 11: mod_base = OTHER; note = 2'-deoxy-2'-fluorouridine-3'-phosphate
  modified_base 12: mod_base = OTHER; note = 2'-O-methylguanosine-3'-phosphate
  modified_base 13: mod_base = OTHER; note = 2'-O-methylcytidine-3'-phosphate
  modified_base 14: mod_base = OTHER; note = 2'-O-methyluridine-3'-phosphate
  modified_base 15: mod_base = OTHER; note = 2'-O-methylguanosine-3'-phosphate
  modified_base 16: mod_base = OTHER; note = 2'-O-methyladenosine-3'-phosphate
  modified_base 17: mod_base = OTHER; note = 2'-O-methyluridine-3'-phosphate
  modified_base 18: mod_base = OTHER; note = 2'-O-methyluridine-3'-phosphate
  modified_base 19: mod_base = OTHER; note = 2'-O-methyladenosine-3'-phosphate
  modified_base 20: mod_base = OTHER; note = 2'-O-methyluridine-3'-phosphate
  modified_base 21: mod_base = OTHER; note = 2'-O-methyladenosine-3'-phosphate ((2S,4R)-1-[29-[[2-(acetylamino)-2-deoxy-beta-D-galactopyra nosyl]oxy]-14,14-bis[[3-[[3-[[5-[[2-(acetylamino)-2-deoxy-b eta-D-galactopyranosyl]oxy]-1-oxopentyl]amino]propyl]amino] -3-oxopropoxy]methyl]-1,12,19,25-tetraoxo-16-oxa-13,20,24-t riazanonacos-1-yl]-4-hydroxy-2-pyrrolidinyl)methyl ester
tctggacagttgctgattata

SEQ ID NO: 1014 - RNA, 21 nt, synthetic construct
  source 1..21: mol_type = other RNA
  modified_base 1: mod_base = OTHER; note = 2'-O-methylcytidine-3'-phosphorothioate
  modified_base 2: mod_base = OTHER; note = 2'-O-methyluridine-3'-phosphorothioate
  modified_base 3: mod_base = OTHER; note = 2'-O-methylguanosine-3'-phosphate
  modified_base 4: mod_base = OTHER; note = 2'-O-methylguanosine-3'-phosphate
  modified_base 5: mod_base = OTHER; note = 2'-O-methyladenosine-3'-phosphate
  modified_base 6: mod_base = OTHER; note = 2'-O-hexadecyl-cytidine-3'-phosphate
  modified_base 7: mod_base = OTHER; note = 2'-deoxy-2'-fluoroadenosine-3'-phosphate
  modified_base 8: mod_base = OTHER; note = 2'-O-methylguanosine-3'-phosphate
  modified_base 9: mod_base = OTHER; note = 2'-deoxy-2'-fluorouridine-3'-phosphate
  modified_base 10: mod_base = OTHER; note = 2'-deoxy-2'-fluorouridine-3'-phosphate
  modified_base 11: mod_base = OTHER; note = 2'-deoxy-2'-fluoroguanosine-3'-phosphate
  modified_base 12: mod_base = OTHER; note = 2'-O-methylcytidine-3'-phosphate
  modified_base 13: mod_base = OTHER; note = 2'-O-methyluridine-3'-phosphate
  modified_base 14: mod_base = OTHER; note = 2'-O-methylguanosine-3'-phosphate
  modified_base 15: mod_base = OTHER; note = 2'-O-methyladenosine-3'-phosphate
  modified_base 16: mod_base = OTHER; note = 2'-O-methyluridine-3'-phosphate
  modified_base 17: mod_base = OTHER; note = 2'-O-methyluridine-3'-phosphate
  modified_base 18: mod_base = OTHER; note = 2'-O-methyladenosine-3'-phosphate
  modified_base 19: mod_base = OTHER; note = 2'-O-methyluridine-3'-phosphate
  modified_base 20: mod_base = OTHER; note = 2'-O-methylguanosine-3'-phosphate
  modified_base 21: mod_base = OTHER; note = 2'-O-methyladenosine-3'-phosphate ((2S,4R)-1-[29-[[2-(acetylamino)-2-deoxy-beta-D-galactopyra nosyl]oxy]-14,14-bis[[3-[[3-[[5-[[2-(acetylamino)-2-deoxy-b eta-D-galactopyranosyl]oxy]-1-oxopentyl]amino]propyl]amino] -3-oxopropoxy]methyl]-1,12,19,25-tetraoxo-16-oxa-13,20,24-t riazanonacos-1-yl]-4-hydroxy-2-pyrrolidinyl)methyl ester
ctggacagttgctgattatga

SEQ ID NO: 1015 - RNA, 21 nt, synthetic construct
  source 1..21: mol_type = other RNA
  modified_base 1: mod_base = OTHER; note = 2'-O-methylguanosine-3'-phosphorothioate
  modified_base 2: mod_base = OTHER; note = 2'-O-methyluridine-3'-phosphorothioate
  modified_base 3: mod_base = OTHER; note = 2'-O-methylcytidine-3'-phosphate
  modified_base 4: mod_base = OTHER; note = 2'-O-methyluridine-3'-phosphate
  modified_base 5: mod_base = OTHER; note = 2'-O-methylcytidine-3'-phosphate
  modified_base 6: mod_base = OTHER; note = 2'-O-hexadecyl-guanosine-3'-phosphate
  modified_base 7: mod_base = OTHER; note = 2'-deoxy-2'-fluorocytidine-3'-phosphate
  modified_base 8: mod_base = OTHER; note = 2'-O-methylcytidine-3'-phosphate
  modified_base 9: mod_base = OTHER; note = 2'-deoxy-2'-fluorouridine-3'-phosphate
  modified_base 10: mod_base = OTHER; note = 2'-deoxy-2'-fluorouridine-3'-phosphate
  modified_base 11: mod_base = OTHER; note = 2'-deoxy-2'-fluorouridine-3'-phosphate
  modified_base 12: mod_base = OTHER; note = 2'-O-methyluridine-3'-phosphate
  modified_base 13: mod_base = OTHER; note = 2'-O-methylcytidine-3'-phosphate
  modified_base 14: mod_base = OTHER; note = 2'-O-methylcytidine-3'-phosphate
  modified_base 15: mod_base = OTHER; note = 2'-O-methyluridine-3'-phosphate
  modified_base 16: mod_base = OTHER; note = 2'-O-methyluridine-3'-phosphate
  modified_base 17: mod_base = OTHER; note = 2'-O-methyladenosine-3'-phosphate
  modified_base 18: mod_base = OTHER; note = 2'-O-methylcytidine-3'-phosphate
  modified_base 19: mod_base = OTHER; note = 2'-O-methylguanosine-3'-phosphate
  modified_base 20: mod_base = OTHER; note = 2'-O-methylguanosine-3'-phosphate
  modified_base 21: mod_base = OTHER; note = 2'-O-methyladenosine-3'-phosphate ((2S,4R)-1-[29-[[2-(acetylamino)-2-deoxy-beta-D-galactopyra nosyl]oxy]-14,14-bis[[3-[[3-[[5-[[2-(acetylamino)-2-deoxy-b eta-D-galactopyranosyl]oxy]-1-oxopentyl]amino]propyl]amino] -3-oxopropoxy]methyl]-1,12,19,25-tetraoxo-16-oxa-13,20,24-t riazanonacos-1-yl]-4-hydroxy-2-pyrrolidinyl)methyl ester
gtctcgccttttccttacgga

SEQ ID NO: 1016 - RNA, 21 nt, synthetic construct
  source 1..21: mol_type = other RNA
  modified_base 1: mod_base = OTHER; note = 2'-O-methyluridine-3'-phosphorothioate
  modified_base 2: mod_base = OTHER; note = 2'-O-methylcytidine-3'-phosphorothioate
  modified_base 3: mod_base = OTHER; note = 2'-O-methyluridine-3'-phosphate
  modified_base 4: mod_base = OTHER; note = 2'-O-methylcytidine-3'-phosphate
  modified_base 5: mod_base = OTHER; note = 2'-O-methylguanosine-3'-phosphate
  modified_base 6: mod_base = OTHER; note = 2'-O-hexadecyl-cytidine-3'-phosphate
  modified_base 7: mod_base = OTHER; note = 2'-deoxy-2'-fluorocytidine-3'-phosphate
  modified_base 8: mod_base = OTHER; note = 2'-O-methyluridine-3'-phosphate
  modified_base 9: mod_base = OTHER; note = 2'-deoxy-2'-fluorouridine-3'-phosphate
  modified_base 10: mod_base = OTHER; note = 2'-deoxy-2'-fluorouridine-3'-phosphate
  modified_base 11: mod_base = OTHER; note = 2'-deoxy-2'-fluorouridine-3'-phosphate
  modified_base 12: mod_base = OTHER; note = 2'-O-methylcytidine-3'-phosphate
  modified_base 13: mod_base = OTHER; note = 2'-O-methylcytidine-3'-phosphate
  modified_base 14: mod_base = OTHER; note = 2'-O-methyluridine-3'-phosphate
  modified_base 15: mod_base = OTHER; note = 2'-O-methyluridine-3'-phosphate
  modified_base 16: mod_base = OTHER; note = 2'-O-methyladenosine-3'-phosphate
  modified_base 17: mod_base = OTHER; note = 2'-O-methylcytidine-3'-phosphate
  modified_base 18: mod_base = OTHER; note = 2'-O-methylguanosine-3'-phosphate
  modified_base 19: mod_base = OTHER; note = 2'-O-methylguanosine-3'-phosphate
  modified_base 20: mod_base = OTHER; note = 2'-O-methyladenosine-3'-phosphate
  modified_base 21: mod_base = OTHER; note = 2'-O-methyladenosine-3'-phosphate ((2S,4R)-1-[29-[[2-(acetylamino)-2-deoxy-beta-D-galactopyra nosyl]oxy]-14,14-bis[[3-[[3-[[5-[[2-(acetylamino)-2-deoxy-b eta-D-galactopyranosyl]oxy]-1-oxopentyl]amino]propyl]amino] -3-oxopropoxy]methyl]-1,12,19,25-tetraoxo-16-oxa-13,20,24-t riazanonacos-1-yl]-4-hydroxy-2-pyrrolidinyl)methyl ester
tctcgccttttccttacggaa

SEQ ID NO: 1017 - RNA, 21 nt, synthetic construct
  source 1..21: mol_type = other RNA
  modified_base 1: mod_base = OTHER; note = 2'-O-methyluridine-3'-phosphorothioate
  modified_base 2: mod_base = OTHER; note = 2'-O-methylcytidine-3'-phosphorothioate
  modified_base 3: mod_base = OTHER; note = 2'-O-methylguanosine-3'-phosphate
  modified_base 4: mod_base = OTHER; note = 2'-O-methylcytidine-3'-phosphate
  modified_base 5: mod_base = OTHER; note = 2'-O-methylcytidine-3'-phosphate
  modified_base 6: mod_base = OTHER; note = 2'-O-hexadecyl-uridine-3'-phosphate
  modified_base 7: mod_base = OTHER; note = 2'-deoxy-2'-fluorouridine-3'-phosphate
  modified_base 8: mod_base = OTHER; note = 2'-O-methyluridine-3'-phosphate
  modified_base 9: mod_base = OTHER; note = 2'-deoxy-2'-fluorouridine-3'-phosphate
  modified_base 10: mod_base = OTHER; note = 2'-deoxy-2'-fluorocytidine-3'-phosphate
  modified_base 11: mod_base = OTHER; note = 2'-deoxy-2'-fluorocytidine-3'-phosphate
  modified_base 12: mod_base = OTHER; note = 2'-O-methyluridine-3'-phosphate
  modified_base 13: mod_base = OTHER; note = 2'-O-methyluridine-3'-phosphate
  modified_base 14: mod_base = OTHER; note = 2'-O-methyladenosine-3'-phosphate
  modified_base 15: mod_base = OTHER; note = 2'-O-methylcytidine-3'-phosphate
  modified_base 16: mod_base = OTHER; note = 2'-O-methylguanosine-3'-phosphate
  modified_base 17: mod_base = OTHER; note = 2'-O-methylguanosine-3'-phosphate
  modified_base 18: mod_base = OTHER; note = 2'-O-methyladenosine-3'-phosphate
  modified_base 19: mod_base = OTHER; note = 2'-O-methyluridine-3'-phosphate
  modified_base 20: mod_base = OTHER; note = 2'-O-methyluridine-3'-phosphate
  modified_base 21: mod_base = OTHER; note = 2'-O-methyladenosine-3'-phosphate ((2S,4R)-1-[29-[[2-(acetylamino)-2-deoxy-beta-D-galactopyra nosyl]oxy]-14,14-bis[[3-[[3-[[5-[[2-(acetylamino)-2-deoxy-b eta-D-galactopyranosyl]oxy]-1-oxopentyl]amino]propyl]amino] -3-oxopropoxy]methyl]-1,12,19,25-tetraoxo-16-oxa-13,20,24-t riazanonacos-1-yl]-4-hydroxy-2-pyrrolidinyl)methyl ester
tcgccttttccttacggatta

SEQ ID NO: 1018 - RNA, 21 nt, synthetic construct
  source 1..21: mol_type = other RNA
  modified_base 1: mod_base = OTHER; note = 2'-O-methylcytidine-3'-phosphorothioate
  modified_base 2: mod_base = OTHER; note = 2'-O-methylguanosine-3'-phosphorothioate
  modified_base 3: mod_base = OTHER; note = 2'-O-methylcytidine-3'-phosphate
  modified_base 4: mod_base = OTHER; note = 2'-O-methylcytidine-3'-phosphate
  modified_base 5: mod_base = OTHER; note = 2'-O-methyluridine-3'-phosphate
  modified_base 6: mod_base = OTHER; note = 2'-O-hexadecyl-uridine-3'-phosphate
  modified_base 7: mod_base = OTHER; note = 2'-deoxy-2'-fluorouridine-3'-phosphate
  modified_base 8: mod_base = OTHER; note = 2'-O-methyluridine-3'-phosphate
  modified_base 9: mod_base = OTHER; note = 2'-deoxy-2'-fluorocytidine-3'-phosphate
  modified_base 10: mod_base = OTHER; note = 2'-deoxy-2'-fluorocytidine-3'-phosphate
  modified_base 11: mod_base = OTHER; note = 2'-deoxy-2'-fluorouridine-3'-phosphate
  modified_base 12: mod_base = OTHER; note = 2'-O-methyluridine-3'-phosphate
  modified_base 13: mod_base = OTHER; note = 2'-O-methyladenosine-3'-phosphate
  modified_base 14: mod_base = OTHER; note = 2'-O-methylcytidine-3'-phosphate
  modified_base 15: mod_base = OTHER; note = 2'-O-methylguanosine-3'-phosphate
  modified_base 16: mod_base = OTHER; note = 2'-O-methylguanosine-3'-phosphate
  modified_base 17: mod_base = OTHER; note = 2'-O-methyladenosine-3'-phosphate
  modified_base 18: mod_base = OTHER; note = 2'-O-methyluridine-3'-phosphate
  modified_base 19: mod_base = OTHER; note = 2'-O-methyluridine-3'-phosphate
  modified_base 20: mod_base = OTHER; note = 2'-O-methyluridine-3'-phosphate
  modified_base 21: mod_base = OTHER; note = 2'-O-methyladenosine-3'-phosphate ((2S,4R)-1-[29-[[2-(acetylamino)-2-deoxy-beta-D-galactopyra nosyl]oxy]-14,14-bis[[3-[[3-[[5-[[2-(acetylamino)-2-deoxy-b eta-D-galactopyranosyl]oxy]-1-oxopentyl]amino]propyl]amino] -3-oxopropoxy]methyl]-1,12,19,25-tetraoxo-16-oxa-13,20,24-t riazanonacos-1-yl]-4-hydroxy-2-pyrrolidinyl)methyl ester
cgccttttccttacggattta

SEQ ID NO: 1019 - RNA, 21 nt, synthetic construct
  source 1..21: mol_type = other RNA
  modified_base 1: mod_base = OTHER; note = 2'-O-methylguanosine-3'-phosphorothioate
  modified_base 2: mod_base = OTHER; note = 2'-O-methylcytidine-3'-phosphorothioate
  modified_base 3: mod_base = OTHER; note = 2'-O-methylcytidine-3'-phosphate
  modified_base 4: mod_base = OTHER; note = 2'-O-methyluridine-3'-phosphate
  modified_base 5: mod_base = OTHER; note = 2'-O-methyluridine-3'-phosphate
  modified_base 6: mod_base = OTHER; note = 2'-O-hexadecyl-uridine-3'-phosphate
  modified_base 7: mod_base = OTHER; note = 2'-deoxy-2'-fluorouridine-3'-phosphate
  modified_base 8: mod_base = OTHER; note = 2'-O-methylcytidine-3'-phosphate
  modified_base 9: mod_base = OTHER; note = 2'-deoxy-2'-fluorocytidine-3'-phosphate
  modified_base 10: mod_base = OTHER; note = 2'-deoxy-2'-fluorouridine-3'-phosphate
  modified_base 11: mod_base = OTHER; note = 2'-deoxy-2'-fluorouridine-3'-phosphate
  modified_base 12: mod_base = OTHER; note = 2'-O-methyladenosine-3'-phosphate
  modified_base 13: mod_base = OTHER; note = 2'-O-methylcytidine-3'-phosphate
  modified_base 14: mod_base = OTHER; note = 2'-O-methylguanosine-3'-phosphate
  modified_base 15: mod_base = OTHER; note = 2'-O-methylguanosine-3'-phosphate
  modified_base 16: mod_base = OTHER; note = 2'-O-methyladenosine-3'-phosphate
  modified_base 17: mod_base = OTHER; note = 2'-O-methyluridine-3'-phosphate
  modified_base 18: mod_base = OTHER; note = 2'-O-methyluridine-3'-phosphate
  modified_base 19: mod_base = OTHER; note = 2'-O-methyluridine-3'-phosphate
  modified_base 20: mod_base = OTHER; note = 2'-O-methyluridine-3'-phosphate
  modified_base 21: mod_base = OTHER; note = 2'-O-methyladenosine-3'-phosphate ((2S,4R)-1-[29-[[2-(acetylamino)-2-deoxy-beta-D-galactopyra nosyl]oxy]-14,14-bis[[3-[[3-[[5-[[2-(acetylamino)-2-deoxy-b eta-D-galactopyranosyl]oxy]-1-oxopentyl]amino]propyl]amino] -3-oxopropoxy]methyl]-1,12,19,25-tetraoxo-16-oxa-13,20,24-t riazanonacos-1-yl]-4-hydroxy-2-pyrrolidinyl)methyl ester
gccttttccttacggatttta

SEQ ID NO: 1020 - RNA, 21 nt, synthetic construct
  source 1..21: mol_type = other RNA
  modified_base 1: mod_base = OTHER; note = 2'-O-methyladenosine-3'-phosphorothioate
  modified_base 2: mod_base = OTHER; note = 2'-O-methyladenosine-3'-phosphorothioate
  modified_base 3: mod_base = OTHER; note = 2'-O-methylcytidine-3'-phosphate
  modified_base 4: mod_base = OTHER; note = 2'-O-methylcytidine-3'-phosphate
  modified_base 5: mod_base = OTHER; note = 2'-O-methyladenosine-3'-phosphate
  modified_base 6: mod_base = OTHER; note = 2'-O-hexadecyl-uridine-3'-phosphate
  modified_base 7: mod_base = OTHER; note = 2'-deoxy-2'-fluoroadenosine-3'-phosphate
  modified_base 8: mod_base = OTHER; note = 2'-O-methyladenosine-3'-phosphate
  modified_base 9: mod_base = OTHER; note = 2'-deoxy-2'-fluorouridine-3'-phosphate
  modified_base 10: mod_base = OTHER; note = 2'-deoxy-2'-fluorouridine-3'-phosphate
  modified_base 11: mod_base = OTHER; note = 2'-deoxy-2'-fluorouridine-3'-phosphate
  modified_base 12: mod_base = OTHER; note = 2'-O-methylguanosine-3'-phosphate
  modified_base 13: mod_base = OTHER; note = 2'-O-methylguanosine-3'-phosphate
  modified_base 14: mod_base = OTHER; note = 2'-O-methyladenosine-3'-phosphate
  modified_base 15: mod_base = OTHER; note = 2'-O-methylguanosine-3'-phosphate
  modified_base 16: mod_base = OTHER; note = 2'-O-methylcytidine-3'-phosphate
  modified_base 17: mod_base = OTHER; note = 2'-O-methyluridine-3'-phosphate
  modified_base 18: mod_base = OTHER; note = 2'-O-methyladenosine-3'-phosphate
  modified_base 19: mod_base = OTHER; note = 2'-O-methyluridine-3'-phosphate
  modified_base 20: mod_base = OTHER; note = 2'-O-methylcytidine-3'-phosphate
  modified_base 21: mod_base = OTHER; note = 2'-O-methyladenosine-3'-phosphate ((2S,4R)-1-[29-[[2-(acetylamino)-2-deoxy-beta-D-galactopyra nosyl]oxy]-14,14-bis[[3-[[3-[[5-[[2-(acetylamino)-2-deoxy-b eta-D-galactopyranosyl]oxy]-1-oxopentyl]amino]propyl]amino] -3-oxopropoxy]methyl]-1,12,19,25-tetraoxo-16-oxa-13,20,24-t riazanonacos-1-yl]-4-hydroxy-2-pyrrolidinyl)methyl ester
aaccataatttggagctatca

SEQ ID NO: 1021 - RNA, 21 nt, synthetic construct
  source 1..21: mol_type = other RNA
  modified_base 1: mod_base = OTHER; note = 2'-O-methyladenosine-3'-phosphorothioate
  modified_base 2: mod_base = OTHER; note = 2'-O-methylguanosine-3'-phosphorothioate
  modified_base 3: mod_base = OTHER; note = 2'-O-methylcytidine-3'-phosphate
  modified_base 4: mod_base = OTHER; note = 2'-O-methyladenosine-3'-phosphate
  modified_base 5: mod_base = OTHER; note = 2'-O-methylguanosine-3'-phosphate
  modified_base 6: mod_base = OTHER; note = 2'-O-hexadecyl-uridine-3'-phosphate
  modified_base 7: mod_base = OTHER; note = 2'-deoxy-2'-fluorouridine-3'-phosphate
  modified_base 8: mod_base = OTHER; note = 2'-O-methyluridine-3'-phosphate
  modified_base 9: mod_base = OTHER; note = 2'-deoxy-2'-fluoroadenosine-3'-phosphate
  modified_base 10: mod_base = OTHER; note = 2'-deoxy-2'-fluorocytidine-3'-phosphate
  modified_base 11: mod_base = OTHER; note = 2'-deoxy-2'-fluorocytidine-3'-phosphate
  modified_base 12: mod_base = OTHER; note = 2'-O-methyluridine-3'-phosphate
  modified_base 13: mod_base = OTHER; note = 2'-O-methylguanosine-3'-phosphate
  modified_base 14: mod_base = OTHER; note = 2'-O-methyluridine-3'-phosphate
  modified_base 15: mod_base = OTHER; note = 2'-O-methylcytidine-3'-phosphate
  modified_base 16: mod_base = OTHER; note = 2'-O-methyladenosine-3'-phosphate
  modified_base 17: mod_base = OTHER; note = 2'-O-methyladenosine-3'-phosphate
  modified_base 18: mod_base = OTHER; note = 2'-O-methyluridine-3'-phosphate
  modified_base 19: mod_base = OTHER; note = 2'-O-methylguanosine-3'-phosphate
  modified_base 20: mod_base = OTHER; note = 2'-O-methylcytidine-3'-phosphate
  modified_base 21: mod_base = OTHER; note = 2'-O-methyladenosine-3'-phosphate ((2S,4R)-1-[29-[[2-(acetylamino)-2-deoxy-beta-D-galactopyra nosyl]oxy]-14,14-bis[[3-[[3-[[5-[[2-(acetylamino)-2-deoxy-b eta-D-galactopyranosyl]oxy]-1-oxopentyl]amino]propyl]amino] -3-oxopropoxy]methyl]-1,12,19,25-tetraoxo-16-oxa-13,20,24-t riazanonacos-1-yl]-4-hydroxy-2-pyrrolidinyl)methyl ester
agcagtttacctgtcaatgca

SEQ ID NO: 1022 - RNA, 21 nt, synthetic construct
  source 1..21: mol_type = other RNA
  modified_base 1: mod_base = OTHER; note = 2'-O-methylcytidine-3'-phosphorothioate
  modified_base 2: mod_base = OTHER; note = 2'-O-methyladenosine-3'-phosphorothioate
  modified_base 3: mod_base = OTHER; note = 2'-O-methylguanosine-3'-phosphate
  modified_base 4: mod_base = OTHER; note = 2'-O-methyluridine-3'-phosphate
  modified_base 5: mod_base = OTHER; note = 2'-O-methyluridine-3'-phosphate
  modified_base 6: mod_base = OTHER; note = 2'-O-hexadecyl-uridine-3'-phosphate
  modified_base 7: mod_base = OTHER; note = 2'-deoxy-2'-fluoroadenosine-3'-phosphate
  modified_base 8: mod_base = OTHER; note = 2'-O-methylcytidine-3'-phosphate
  modified_base 9: mod_base = OTHER; note = 2'-deoxy-2'-fluorocytidine-3'-phosphate
  modified_base 10: mod_base = OTHER; note = 2'-deoxy-2'-fluorouridine-3'-phosphate
  modified_base 11: mod_base = OTHER; note = 2'-deoxy-2'-fluoroguanosine-3'-phosphate
  modified_base 12: mod_base = OTHER; note = 2'-O-methyluridine-3'-phosphate
  modified_base 13: mod_base = OTHER; note = 2'-O-methylcytidine-3'-phosphate
  modified_base 14: mod_base = OTHER; note = 2'-O-methyladenosine-3'-phosphate
  modified_base 15: mod_base = OTHER; note = 2'-O-methyladenosine-3'-phosphate
  modified_base 16: mod_base = OTHER; note = 2'-O-methyluridine-3'-phosphate
  modified_base 17: mod_base = OTHER; note = 2'-O-methylguanosine-3'-phosphate
  modified_base 18: mod_base = OTHER; note = 2'-O-methylcytidine-3'-phosphate
  modified_base 19: mod_base = OTHER; note = 2'-O-methylcytidine-3'-phosphate
  modified_base 20: mod_base = OTHER; note = 2'-O-methyluridine-3'-phosphate
  modified_base 21: mod_base = OTHER; note = 2'-O-methyladenosine-3'-phosphate ((2S,4R)-1-[29-[[2-(acetylamino)-2-deoxy-beta-D-galactopyra nosyl]oxy]-14,14-bis[[3-[[3-[[5-[[2-(acetylamino)-2-deoxy-b eta-D-galactopyranosyl]oxy]-1-oxopentyl]amino]propyl]amino] -3-oxopropoxy]methyl]-1,12,19,25-tetraoxo-16-oxa-13,20,24-t riazanonacos-1-yl]-4-hydroxy-2-pyrrolidinyl)methyl ester
cagtttacctgtcaatgccta

SEQ ID NO: 1023 - RNA, 21 nt, synthetic construct
  source 1..21: mol_type = other RNA
  modified_base 1: mod_base = OTHER; note = 2'-O-methylcytidine-3'-phosphorothioate
  modified_base 2: mod_base = OTHER; note = 2'-O-methyluridine-3'-phosphorothioate
  modified_base 3: mod_base = OTHER; note = 2'-O-methylcytidine-3'-phosphate
  modified_base 4: mod_base = OTHER; note = 2'-O-methyluridine-3'-phosphate
  modified_base 5: mod_base = OTHER; note = 2'-O-methyladenosine-3'-phosphate
  modified_base 6: mod_base = OTHER; note = 2'-O-hexadecyl-adenosine-3'-phosphate
  modified_base 7: mod_base = OTHER; note = 2'-deoxy-2'-fluorouridine-3'-phosphate
  modified_base 8: mod_base = OTHER; note = 2'-O-methylguanosine-3'-phosphate
  modified_base 9: mod_base = OTHER; note = 2'-deoxy-2'-fluorouridine-3'-phosphate
  modified_base 10: mod_base = OTHER; note = 2'-deoxy-2'-fluorocytidine-3'-phosphate
  modified_base 11: mod_base = OTHER; note = 2'-deoxy-2'-fluoroadenosine-3'-phosphate
  modified_base 12: mod_base = OTHER; note = 2'-O-methyluridine-3'-phosphate
  modified_base 13: mod_base = OTHER; note = 2'-O-methyluridine-3'-phosphate
  modified_base 14: mod_base = OTHER; note = 2'-O-methylcytidine-3'-phosphate
  modified_base 15: mod_base = OTHER; note = 2'-O-methyladenosine-3'-phosphate
  modified_base 16: mod_base = OTHER; note = 2'-O-methylcytidine-3'-phosphate
  modified_base 17: mod_base = OTHER; note = 2'-O-methyladenosine-3'-phosphate
  modified_base 18: mod_base = OTHER; note = 2'-O-methyluridine-3'-phosphate
  modified_base 19: mod_base = OTHER; note = 2'-O-methyluridine-3'-phosphate
  modified_base 20: mod_base = OTHER; note = 2'-O-methylguanosine-3'-phosphate
  modified_base 21: mod_base = OTHER; note = 2'-O-methyladenosine-3'-phosphate ((2S,4R)-1-[29-[[2-(acetylamino)-2-deoxy-beta-D-galactopyra nosyl]oxy]-14,14-bis[[3-[[3-[[5-[[2-(acetylamino)-2-deoxy-b eta-D-galactopyranosyl]oxy]-1-oxopentyl]amino]propyl]amino] -3-oxopropoxy]methyl]-1,12,19,25-tetraoxo-16-oxa-13,20,24-t riazanonacos-1-yl]-4-hydroxy-2-pyrrolidinyl)methyl ester
ctctaatgtcattcacattga

SEQ ID NO: 1024 - RNA, 23 nt, synthetic construct
  source 1..23: mol_type = other RNA
  modified_base 1: mod_base = OTHER; note = 2'-O-methyluridine-3'-phosphorothioate 5'-(E)-Vinylphosphonate
  modified_base 2: mod_base = OTHER; note = 2'-deoxy-2'-fluoroadenosine-3'-phosphorothioate
  modified_base 3: mod_base = OTHER; note = 2'-O-methyluridine-3'-phosphate
  modified_base 4: mod_base = OTHER; note = 2'-O-methyluridine-3'-phosphate
  modified_base 5: mod_base = OTHER; note = 2'-O-methyluridine-3'-phosphate
  modified_base 6: mod_base = OTHER; note = 2'-deoxy-2'-fluorouridine-3'-phosphate
  modified_base 7: mod_base = OTHER; note = 2'-O-methyladenosine-3'-phosphate
  modified_base 8: mod_base = OTHER; note = 2'-deoxy-2'-fluoroguanosine-3'-phosphate
  modified_base 9: mod_base = OTHER; note = 2'-deoxy-2'-fluorocytidine-3'-phosphate
  modified_base 10: mod_base = OTHER; note = 2'-O-methyluridine-3'-phosphate
  modified_base 11: mod_base = OTHER; note = 2'-O-methyluridine-3'-phosphate
  modified_base 12: mod_base = OTHER; note = 2'-O-methylcytidine-3'-phosphate
  modified_base 13: mod_base = OTHER; note = 2'-O-methyladenosine-3'-phosphate
  modified_base 14: mod_base = OTHER; note = 2'-deoxy-2'-fluorouridine-3'-phosphate
  modified_base 15: mod_base = OTHER; note = 2'-O-methyladenosine-3'-phosphate
  modified_base 16: mod_base = OTHER; note = 2'-deoxy-2'-fluorocytidine-3'-phosphate
  modified_base 17: mod_base = OTHER; note = 2'-O-methylcytidine-3'-phosphate
  modified_base 18: mod_base = OTHER; note = 2'-O-methylcytidine-3'-phosphate
  modified_base 19: mod_base = OTHER; note = 2'-O-methylguanosine-3'-phosphate
  modified_base 20: mod_base = OTHER; note = 2'-O-methylguanosine-3'-phosphate
  modified_base 21: mod_base = OTHER; note = 2'-O-methyluridine-3'-phosphorothioate
  modified_base 22: mod_base = OTHER; note = 2'-O-methylguanosine-3'-phosphorothioate
  modified_base 23: mod_base = OTHER; note = 2'-O-methylguanosine
tattttagcttcatacccggtgg

SEQ ID NO: 1025 - RNA, 23 nt, synthetic construct
  source 1..23: mol_type = other RNA
  modified_base 1: mod_base = OTHER; note = 2'-O-methyluridine-3'-phosphorothioate 5'-(E)-Vinylphosphonate
  modified_base 2: mod_base = OTHER; note = 2'-deoxy-2'-fluoroadenosine-3'-phosphorothioate
  modified_base 3: mod_base = OTHER; note = 2'-O-methyladenosine-3'-phosphate
  modified_base 4: mod_base = OTHER; note = 2'-O-methylcytidine-3'-phosphate
  modified_base 5: mod_base = OTHER; note = 2'-O-methylguanosine-3'-phosphate
  modified_base 6: mod_base = OTHER; note = 2'-deoxy-2'-fluorocytidine-3'-phosphate
  modified_base 7: mod_base = OTHER; note = 2'-O-methyluridine-3'-phosphate
  modified_base 8: mod_base = OTHER; note = 2'-deoxy-2'-fluorouridine-3'-phosphate
  modified_base 9: mod_base = OTHER; note = 2'-deoxy-2'-fluorouridine-3'-phosphate
  modified_base 10: mod_base = OTHER; note = 2'-O-methylcytidine-3'-phosphate
  modified_base 11: mod_base = OTHER; note = 2'-O-methyladenosine-3'-phosphate
  modified_base 12: mod_base = OTHER; note = 2'-O-methyladenosine-3'-phosphate
  modified_base 13: mod_base = OTHER; note = 2'-O-methyluridine-3'-phosphate
  modified_base 14: mod_base = OTHER; note = 2'-deoxy-2'-fluoroadenosine-3'-phosphate
  modified_base 15: mod_base = OTHER; note = 2'-O-methylcytidine-3'-phosphate
  modified_base 16: mod_base = OTHER; note = 2'-deoxy-2'-fluoroadenosine-3'-phosphate
  modified_base 17: mod_base = OTHER; note = 2'-O-methylguanosine-3'-phosphate
  modified_base 18: mod_base = OTHER; note = 2'-O-methylguanosine-3'-phosphate
  modified_base 19: mod_base = OTHER; note = 2'-O-methyladenosine-3'-phosphate
  modified_base 20: mod_base = OTHER; note = 2'-O-methylguanosine-3'-phosphate
  modified_base 21: mod_base = OTHER; note = 2'-O-methyladenosine-3'-phosphorothioate
  modified_base 22: mod_base = OTHER; note = 2'-O-methylguanosine-3'-phosphorothioate
  modified_base 23: mod_base = OTHER; note = 2'-O-methylguanosine
taacgctttcaatacaggagagg

SEQ ID NO: 1026 - RNA, 23 nt, synthetic construct
  source 1..23: mol_type = other RNA
  modified_base 1: mod_base = OTHER; note = 2'-O-methyluridine-3'-phosphorothioate 5'-(E)-Vinylphosphonate
  modified_base 2: mod_base = OTHER; note = 2'-deoxy-2'-fluoroadenosine-3'-phosphorothioate
  modified_base 3: mod_base = OTHER; note = 2'-O-methylguanosine-3'-phosphate
  modified_base 4: mod_base = OTHER; note = 2'-O-methyladenosine-3'-phosphate
  modified_base 5: mod_base = OTHER; note = 2'-O-methylcytidine-3'-phosphate
  modified_base 6: mod_base = OTHER; note = 2'-deoxy-2'-fluorouridine-3'-phosphate
  modified_base 7: mod_base = OTHER; note = 2'-O-methylguanosine-3'-phosphate
  modified_base 8: mod_base = OTHER; note = 2'-deoxy-2'-fluoroadenosine-3'-phosphate
  modified_base 9: mod_base = OTHER; note = 2'-deoxy-2'-fluoroadenosine-3'-phosphate
  modified_base 10: mod_base = OTHER; note = 2'-O-methyladenosine-3'-phosphate
  modified_base 11: mod_base = OTHER; note = 2'-O-methylcytidine-3'-phosphate
  modified_base 12: mod_base = OTHER; note = 2'-O-methylcytidine-3'-phosphate
  modified_base 13: mod_base = OTHER; note = 2'-O-methyladenosine-3'-phosphate
  modified_base 14: mod_base = OTHER; note = 2'-deoxy-2'-fluoroadenosine-3'-phosphate
  modified_base 15: mod_base = OTHER; note = 2'-O-methyluridine-3'-phosphate
  modified_base 16: mod_base = OTHER; note = 2'-deoxy-2'-fluorocytidine-3'-phosphate
  modified_base 17: mod_base = OTHER; note = 2'-O-methyladenosine-3'-phosphate
  modified_base 18: mod_base = OTHER; note = 2'-O-methylguanosine-3'-phosphate
  modified_base 19: mod_base = OTHER; note = 2'-O-methylcytidine-3'-phosphate
  modified_base 20: mod_base = OTHER; note = 2'-O-methyladenosine-3'-phosphate
  modified_base 21: mod_base = OTHER; note = 2'-O-methylguanosine-3'-phosphorothioate
  modified_base 22: mod_base = OTHER; note = 2'-O-methylcytidine-3'-phosphorothioate
  modified_base 23: mod_base = OTHER; note = 2'-O-methyladenosine
tagactgaaaccaatcagcagca

SEQ ID NO: 1027 - RNA, 23 nt, synthetic construct
  source 1..23: mol_type = other RNA
  modified_base 1: mod_base = OTHER; note = 2'-O-methyluridine-3'-phosphorothioate 5'-(E)-Vinylphosphonate
  modified_base 2: mod_base = OTHER; note = 2'-deoxy-2'-fluoroguanosine-3'-phosphorothioate
  modified_base 3: mod_base = OTHER; note = 2'-O-methyluridine-3'-phosphate
  modified_base 4: mod_base = OTHER; note = 2'-O-methyluridine-3'-phosphate
  modified_base 5: mod_base = OTHER; note = 2'-O-methylcytidine-3'-phosphate
  modified_base 6: mod_base = OTHER; note = 2'-deoxy-2'-fluoroguanosine-3'-phosphate
  modified_base 7: mod_base = OTHER; note = 2'-O-methyladenosine-3'-phosphate
  modified_base 8: mod_base = OTHER; note = 2'-deoxy-2'-fluoroguanosine-3'-phosphate
  modified_base 9: mod_base = OTHER; note = 2'-deoxy-2'-fluorouridine-3'-phosphate
  modified_base 10: mod_base = OTHER; note = 2'-O-methyluridine-3'-phosphate
  modified_base 11: mod_base = OTHER; note = 2'-O-methylguanosine-3'-phosphate
  modified_base 12: mod_base = OTHER; note = 2'-O-methyluridine-3'-phosphate
  modified_base 13: mod_base = OTHER; note = 2'-O-methyluridine-3'-phosphate
  modified_base 14: mod_base = OTHER; note = 2'-deoxy-2'-fluorouridine-3'-phosphate
  modified_base 15: mod_base = OTHER; note = 2'-O-methylcytidine-3'-phosphate
  modified_base 16: mod_base = OTHER; note = 2'-deoxy-2'-fluorouridine-3'-phosphate
  modified_base 17: mod_base = OTHER; note = 2'-O-methylguanosine-3'-phosphate
  modified_base 18: mod_base = OTHER; note = 2'-O-methylguanosine-3'-phosphate
  modified_base 19: mod_base = OTHER; note = 2'-O-methyladenosine-3'-phosphate
  modified_base 20: mod_base = OTHER; note = 2'-O-methylguanosine-3'-phosphate
  modified_base 21: mod_base = OTHER; note = 2'-O-methylguanosine-3'-phosphorothioate
  modified_base 22: mod_base = OTHER; note = 2'-O-methylcytidine-3'-phosphorothioate
  modified_base 23: mod_base = OTHER; note = 2'-O-methylcytidine
tgttcgagttgtttctggaggcc

SEQ ID NO: 1028 - RNA, 23 nt, synthetic construct
  source 1..23: mol_type = other RNA
  modified_base 1: mod_base = OTHER; note = 2'-O-methyluridine-3'-phosphorothioate 5'-(E)-Vinylphosphonate
  modified_base 2: mod_base = OTHER; note = 2'-deoxy-2'-fluorocytidine-3'-phosphorothioate
  modified_base 3: mod_base = OTHER; note = 2'-O-methylcytidine-3'-phosphate
  modified_base 4: mod_base = OTHER; note = 2'-O-methyladenosine-3'-phosphate
  modified_base 5: mod_base = OTHER; note = 2'-O-methylguanosine-3'-phosphate
  modified_base 6: mod_base = OTHER; note = 2'-deoxy-2'-fluorouridine-3'-phosphate
  modified_base 7: mod_base = OTHER; note = 2'-O-methyluridine-3'-phosphate
  modified_base 8: mod_base = OTHER; note = 2'-deoxy-2'-fluoroguanosine-3'-phosphate
  modified_base 9: mod_base = OTHER; note = 2'-deoxy-2'-fluorouridine-3'-phosphate
  modified_base 10: mod_base = OTHER; note = 2'-O-methylguanosine-3'-phosphate
  modified_base 11: mod_base = OTHER; note = 2'-O-methyladenosine-3'-phosphate
  modified_base 12: mod_base = OTHER; note = 2'-O-methylguanosine-3'-phosphate
  modified_base 13: mod_base = OTHER; note = 2'-O-methyluridine-3'-phosphate
  modified_base 14: mod_base = OTHER; note = 2'-deoxy-2'-fluoroadenosine-3'-phosphate
  modified_base 15: mod_base = OTHER; note = 2'-O-methyluridine-3'-phosphate
  modified_base 16: mod_base = OTHER; note = 2'-deoxy-2'-fluoroguanosine-3'-phosphate
  modified_base 17: mod_base = OTHER; note = 2'-O-methylcytidine-3'-phosphate
  modified_base 18: mod_base = OTHER; note = 2'-O-methyladenosine-3'-phosphate
  modified_base 19: mod_base = OTHER; note = 2'-O-methylcytidine-3'-phosphate
  modified_base 20: mod_base = OTHER; note = 2'-O-methyluridine-3'-phosphate
  modified_base 21: mod_base = OTHER; note = 2'-O-methyluridine-3'-phosphorothioate
  modified_base 22: mod_base = OTHER; note = 2'-O-methyluridine-3'-phosphorothioate
  modified_base 23: mod_base = OTHER; note = 2'-O-methylcytidine
tccagttgtgagtatgcactttc

SEQ ID NO: 1029 - RNA, 23 nt, synthetic construct
  source 1..23: mol_type = other RNA
  modified_base 1: mod_base = OTHER; note = 2'-O-methyluridine-3'-phosphorothioate 5'-(E)-Vinylphosphonate
  modified_base 2: mod_base = OTHER; note = 2'-deoxy-2'-fluoroguanosine-3'-phosphorothioate
  modified_base 3: mod_base = OTHER; note = 2'-O-methyladenosine-3'-phosphate
  modified_base 4: mod_base = OTHER; note = 2'-O-methyladenosine-3'-phosphate
  modified_base 5: mod_base = OTHER; note = 2'-O-methyladenosine-3'-phosphate
  modified_base 6: mod_base = OTHER; note = 2'-deoxy-2'-fluoroguanosine-3'-phosphate
  modified_base 7: mod_base = OTHER; note = 2'-O-methylcytidine-3'-phosphate
  modified_base 8: mod_base = OTHER; note = 2'-deoxy-2'-fluoroguanosine-3'-phosphate
  modified_base 9: mod_base = OTHER; note = 2'-deoxy-2'-fluoroadenosine-3'-phosphate
  modified_base 10: mod_base = OTHER; note = 2'-O-methylcytidine-3'-phosphate
  modified_base 11: mod_base = OTHER; note = 2'-O-methyluridine-3'-phosphate
  modified_base 12: mod_base = OTHER; note = 2'-O-methyladenosine-3'-phosphate
  modified_base 13: mod_base = OTHER; note = 2'-O-methylguanosine-3'-phosphate
  modified_base 14: mod_base = OTHER; note = 2'-deoxy-2'-fluoroadenosine-3'-phosphate
  modified_base 15: mod_base = OTHER; note = 2'-O-methyluridine-3'-phosphate
  modified_base 16: mod_base = OTHER; note = 2'-deoxy-2'-fluorouridine-3'-phosphate
  modified_base 17: mod_base = OTHER; note = 2'-O-methylcytidine-3'-phosphate
  modified_base 18: mod_base = OTHER; note = 2'-O-methylcytidine-3'-phosphate
  modified_base 19: mod_base = OTHER; note = 2'-O-methyladenosine-3'-phosphate
  modified_base 20: mod_base = OTHER; note = 2'-O-methyladenosine-3'-phosphate
  modified_base 21: mod_base = OTHER; note = 2'-O-methylguanosine-3'-phosphorothioate
  modified_base 22: mod_base = OTHER; note = 2'-O-methyladenosine-3'-phosphorothioate
  modified_base 23: mod_base = OTHER; note = 2'-O-methyluridine
tgaaagcgactagattccaagat

SEQ ID NO: 1030 - RNA, 23 nt, synthetic construct
  source 1..23: mol_type = other RNA
  modified_base 1: mod_base = OTHER; note = 2'-O-methyluridine-3'-phosphorothioate 5'-(E)-Vinylphosphonate
  modified_base 2: mod_base = OTHER; note = 2'-deoxy-2'-fluorocytidine-3'-phosphorothioate
  modified_base 3: mod_base = OTHER; note = 2'-O-methylguanosine-3'-phosphate
  modified_base 4: mod_base = OTHER; note = 2'-O-methyladenosine-3'-phosphate
  modified_base 5: mod_base = OTHER; note = 2'-O-methyladenosine-3'-phosphate
  modified_base 6: mod_base = OTHER; note = 2'-deoxy-2'-fluoroadenosine-3'-phosphate
  modified_base 7: mod_base = OTHER; note = 2'-O-methylguanosine-3'-phosphate
  modified_base 8: mod_base = OTHER; note = 2'-deoxy-2'-fluorocytidine-3'-phosphate
  modified_base 9: mod_base = OTHER; note = 2'-deoxy-2'-fluoroguanosine-3'-phosphate
  modified_base 10: mod_base = OTHER; note = 2'-O-methyladenosine-3'-phosphate
  modified_base 11: mod_base = OTHER; note = 2'-O-methylcytidine-3'-phosphate
  modified_base 12: mod_base = OTHER; note = 2'-O-methyluridine-3'-phosphate
  modified_base 13: mod_base = OTHER; note = 2'-O-methyladenosine-3'-phosphate
  modified_base 14: mod_base = OTHER; note = 2'-deoxy-2'-fluoroguanosine-3'-phosphate
  modified_base 15: mod_base = OTHER; note = 2'-O-methyladenosine-3'-phosphate
  modified_base 16: mod_base = OTHER; note = 2'-deoxy-2'-fluorouridine-3'-phosphate
  modified_base 17: mod_base = OTHER; note = 2'-O-methyluridine-3'-phosphate
  modified_base 18: mod_base = OTHER; note = 2'-O-methylcytidine-3'-phosphate
  modified_base 19: mod_base = OTHER; note = 2'-O-methylcytidine-3'-phosphate
  modified_base 20: mod_base = OTHER; note = 2'-O-methyladenosine-3'-phosphate
  modified_base 21: mod_base = OTHER; note = 2'-O-methyladenosine-3'-phosphorothioate
  modified_base 22: mod_base = OTHER; note = 2'-O-methylguanosine-3'-phosphorothioate
  modified_base 23: mod_base = OTHER; note = 2'-O-methyladenosine
tcgaaagcgactagattccaaga

SEQ ID NO: 1031 - RNA, 23 nt, synthetic construct
  source 1..23: mol_type = other RNA
  modified_base 1: mod_base = OTHER; note = 2'-O-methyluridine-3'-phosphorothioate 5'-(E)-Vinylphosphonate
  modified_base 2: mod_base = OTHER; note = 2'-deoxy-2'-fluoroadenosine-3'-phosphorothioate
  modified_base 3: mod_base = OTHER; note = 2'-O-methylcytidine-3'-phosphate
  modified_base 4: mod_base = OTHER; note = 2'-O-methylguanosine-3'-phosphate
  modified_base 5: mod_base = OTHER; note = 2'-O-methyladenosine-3'-phosphate
  modified_base 6: mod_base = OTHER; note = 2'-deoxy-2'-fluoroadenosine-3'-phosphate
  modified_base 7: mod_base = OTHER; note = 2'-O-methyladenosine-3'-phosphate
  modified_base 8: mod_base = OTHER; note = 2'-deoxy-2'-fluoroguanosine-3'-phosphate
  modified_base 9: mod_base = OTHER; note = 2'-deoxy-2'-fluorocytidine-3'-phosphate
  modified_base 10: mod_base = OTHER; note = 2'-O-methylguanosine-3'-phosphate
  modified_base 11: mod_base = OTHER; note = 2'-O-methyladenosine-3'-phosphate
  modified_base 12: mod_base = OTHER; note = 2'-O-methylcytidine-3'-phosphate
  modified_base 13: mod_base = OTHER; note = 2'-O-methyluridine-3'-phosphate
  modified_base 14: mod_base = OTHER; note = 2'-deoxy-2'-fluoroadenosine-3'-phosphate
  modified_base 15: mod_base = OTHER; note = 2'-O-methylguanosine-3'-phosphate
  modified_base 16: mod_base = OTHER; note = 2'-deoxy-2'-fluoroadenosine-3'-phosphate
  modified_base 17: mod_base = OTHER; note = 2'-O-methyluridine-3'-phosphate
  modified_base 18: mod_base = OTHER; note = 2'-O-methyluridine-3'-phosphate
  modified_base 19: mod_base = OTHER; note = 2'-O-methylcytidine-3'-phosphate
  modified_base 20: mod_base = OTHER; note = 2'-O-methylcytidine-3'-phosphate
  modified_base 21: mod_base = OTHER; note = 2'-O-methyladenosine-3'-phosphorothioate
  modified_base 22: mod_base = OTHER; note = 2'-O-methyladenosine-3'-phosphorothioate
  modified_base 23: mod_base = OTHER; note = 2'-O-methylguanosine
tacgaaagcgactagattccaag

SEQ ID NO: 1032 - RNA, 23 nt, synthetic construct
  source 1..23: mol_type = other RNA
  modified_base 1: mod_base = OTHER; note = 2'-O-methyluridine-3'-phosphorothioate 5'-(E)-Vinylphosphonate
  modified_base 2: mod_base = OTHER; note = 2'-deoxy-2'-fluoroadenosine-3'-phosphorothioate
  modified_base 3: mod_base = OTHER; note = 2'-O-methyladenosine-3'-phosphate
  modified_base 4: mod_base = OTHER; note = 2'-O-methylcytidine-3'-phosphate
  modified_base 5: mod_base = OTHER; note = 2'-O-methylguanosine-3'-phosphate
  modified_base 6: mod_base = OTHER; note = 2'-deoxy-2'-fluoroadenosine-3'-phosphate
  modified_base 7: mod_base = OTHER; note = 2'-O-methyladenosine-3'-phosphate
  modified_base 8: mod_base = OTHER; note = 2'-deoxy-2'-fluoroadenosine-3'-phosphate
  modified_base 9: mod_base = OTHER; note = 2'-deoxy-2'-fluoroguanosine-3'-phosphate
  modified_base 10: mod_base = OTHER; note = 2'-O-methylcytidine-3'-phosphate
  modified_base 11: mod_base = OTHER; note = 2'-O-methylguanosine-3'-phosphate
  modified_base 12: mod_base = OTHER; note = 2'-O-methyladenosine-3'-phosphate
  modified_base 13: mod_base = OTHER; note = 2'-O-methylcytidine-3'-phosphate
  modified_base 14: mod_base = OTHER; note = 2'-deoxy-2'-fluorouridine-3'-phosphate
  modified_base 15: mod_base = OTHER; note = 2'-O-methyladenosine-3'-phosphate
  modified_base 16: mod_base = OTHER; note = 2'-deoxy-2'-fluoroguanosine-3'-phosphate
  modified_base 17: mod_base = OTHER; note = 2'-O-methyladenosine-3'-phosphate
  modified_base 18: mod_base = OTHER; note = 2'-O-methyluridine-3'-phosphate
  modified_base 19: mod_base = OTHER; note = 2'-O-methyluridine-3'-phosphate
  modified_base 20: mod_base = OTHER; note = 2'-O-methylcytidine-3'-phosphate
  modified_base 21: mod_base = OTHER; note = 2'-O-methylcytidine-3'-phosphorothioate
  modified_base 22: mod_base = OTHER; note = 2'-O-methyladenosine-3'-phosphorothioate
  modified_base 23: mod_base = OTHER; note = 2'-O-methyladenosine
taacgaaagcgactagattccaa

SEQ ID NO: 1033 - RNA, 23 nt, synthetic construct
  source 1..23: mol_type = other RNA
  modified_base 1: mod_base = OTHER; note = 2'-O-methyluridine-3'-phosphorothioate 5'-(E)-Vinylphosphonate
  modified_base 2: mod_base = OTHER; note = 2'-deoxy-2'-fluorouridine-3'-phosphorothioate
  modified_base 3: mod_base = OTHER; note = 2'-O-methyladenosine-3'-phosphate
  modified_base 4: mod_base = OTHER; note = 2'-O-methyladenosine-3'-phosphate
  modified_base 5: mod_base = OTHER; note = 2'-O-methylcytidine-3'-phosphate
  modified_base 6: mod_base = OTHER; note = 2'-deoxy-2'-fluoroguanosine-3'-phosphate
  modified_base 7: mod_base = OTHER; note = 2'-O-methyladenosine-3'-phosphate
  modified_base 8: mod_base = OTHER; note = 2'-deoxy-2'-fluoroadenosine-3'-phosphate
  modified_base 9: mod_base = OTHER; note = 2'-deoxy-2'-fluoroadenosine-3'-phosphate
  modified_base 10: mod_base = OTHER; note = 2'-O-methylguanosine-3'-phosphate
  modified_base 11: mod_base = OTHER; note = 2'-O-methylcytidine-3'-phosphate
  modified_base 12: mod_base = OTHER; note = 2'-O-methylguanosine-3'-phosphate
  modified_base 13: mod_base = OTHER; note = 2'-O-methyladenosine-3'-phosphate
  modified_base 14: mod_base = OTHER; note = 2'-deoxy-2'-fluorocytidine-3'-phosphate
  modified_base 15: mod_base = OTHER; note = 2'-O-methyluridine-3'-phosphate
  modified_base 16: mod_base = OTHER; note = 2'-deoxy-2'-fluoroadenosine-3'-phosphate
  modified_base 17: mod_base = OTHER; note = 2'-O-methylguanosine-3'-phosphate
  modified_base 18: mod_base = OTHER; note = 2'-O-methyladenosine-3'-phosphate
  modified_base 19: mod_base = OTHER; note = 2'-O-methyluridine-3'-phosphate
  modified_base 20: mod_base = OTHER; note = 2'-O-methyluridine-3'-phosphate
  modified_base 21: mod_base = OTHER; note = 2'-O-methylcytidine-3'-phosphorothioate
  modified_base 22: mod_base = OTHER; note = 2'-O-methylcytidine-3'-phosphorothioate
  modified_base 23: mod_base = OTHER; note = 2'-O-methyladenosine
ttaacgaaagcgactagattcca

SEQ ID NO: 1034 - RNA, 23 nt, synthetic construct
  source 1..23: mol_type = other RNA
  modified_base 1: mod_base = OTHER; note = 2'-O-methyluridine-3'-phosphorothioate 5'-(E)-Vinylphosphonate
  modified_base 2: mod_base = OTHER; note = 2'-deoxy-2'-fluorouridine-3'-phosphorothioate
  modified_base 3: mod_base = OTHER; note = 2'-O-methylcytidine-3'-phosphate
  modified_base 4: mod_base = OTHER; note = 2'-O-methyluridine-3'-phosphate
  modified_base 5: mod_base = OTHER; note = 2'-O-methyladenosine-3'-phosphate
  modified_base 6: mod_base = OTHER; note = 2'-deoxy-2'-fluorocytidine-3'-phosphate
  modified_base 7: mod_base = OTHER; note = 2'-O-methyluridine-3'-phosphate
  modified_base 8: mod_base = OTHER; note = 2'-deoxy-2'-fluoroadenosine-3'-phosphate
  modified_base 9: mod_base = OTHER; note = 2'-deoxy-2'-fluoroadenosine-3'-phosphate
  modified_base 10: mod_base = OTHER; note = 2'-O-methylguanosine-3'-phosphate
  modified_base 11: mod_base = OTHER; note = 2'-O-methyladenosine-3'-phosphate
  modified_base 12: mod_base = OTHER; note = 2'-O-methyluridine-3'-phosphate
  modified_base 13: mod_base = OTHER; note = 2'-O-methylguanosine-3'-phosphate
  modified_base 14: mod_base = OTHER; note = 2'-deoxy-2'-fluorouridine-3'-phosphate
  modified_base 15: mod_base = OTHER; note = 2'-O-methyladenosine-3'-phosphate
  modified_base 16: mod_base = OTHER; note = 2'-deoxy-2'-fluoroguanosine-3'-phosphate
  modified_base 17: mod_base = OTHER; note = 2'-O-methylcytidine-3'-phosphate
  modified_base 18: mod_base = OTHER; note = 2'-O-methylguanosine-3'-phosphate
  modified_base 19: mod_base = OTHER; note = 2'-O-methylguanosine-3'-phosphate
  modified_base 20: mod_base = OTHER; note = 2'-O-methyluridine-3'-phosphate
  modified_base 21: mod_base = OTHER; note = 2'-O-methylcytidine-3'-phosphorothioate
  modified_base 22: mod_base = OTHER; note = 2'-O-methyladenosine-3'-phosphorothioate
  modified_base 23: mod_base = OTHER; note = 2'-O-methyladenosine
ttctactaagatgtagcggtcaa

SEQ ID NO: 1035 - RNA, 23 nt, synthetic construct
  source 1..23: mol_type = other RNA
  modified_base 1: mod_base = OTHER; note = 2'-O-methyluridine-3'-phosphorothioate 5'-(E)-Vinylphosphonate
  modified_base 2: mod_base = OTHER; note = 2'-deoxy-2'-fluorouridine-3'-phosphorothioate
  modified_base 3: mod_base = OTHER; note = 2'-O-methylguanosine-3'-phosphate
  modified_base 4: mod_base = OTHER; note = 2'-O-methylcytidine-3'-phosphate
  modified_base 5: mod_base = OTHER; note = 2'-O-methylguanosine-3'-phosphate
  modified_base 6: mod_base = OTHER; note = 2'-deoxy-2'-fluoroadenosine-3'-phosphate
  modified_base 7: mod_base = OTHER; note = 2'-O-methylguanosine-3'-phosphate
  modified_base 8: mod_base = OTHER; note = 2'-deoxy-2'-fluorouridine-3'-phosphate
  modified_base 9: mod_base = OTHER; note = 2'-deoxy-2'-fluoroadenosine-3'-phosphate
  modified_base 10: mod_base = OTHER; note = 2'-O-methylcytidine-3'-phosphate
  modified_base 11: mod_base = OTHER; note = 2'-O-methylcytidine-3'-phosphate
  modified_base 12: mod_base = OTHER; note = 2'-O-methyluridine-3'-phosphate
  modified_base 13: mod_base = OTHER; note = 2'-O-methyluridine-3'-phosphate
  modified_base 14: mod_base = OTHER; note = 2'-deoxy-2'-fluorocytidine-3'-phosphate
  modified_base 15: mod_base = OTHER; note = 2'-O-methyluridine-3'-phosphate
  modified_base 16: mod_base = OTHER; note = 2'-deoxy-2'-fluorouridine-3'-phosphate
  modified_base 17: mod_base = OTHER; note = 2'-O-methyluridine-3'-phosphate
  modified_base 18: mod_base = OTHER; note = 2'-O-methylguanosine-3'-phosphate
  modified_base 19: mod_base = OTHER; note = 2'-O-methylcytidine-3'-phosphate
  modified_base 20: mod_base = OTHER; note = 2'-O-methylcytidine-3'-phosphate
  modified_base 21: mod_base = OTHER; note = 2'-O-methylcytidine-3'-phosphorothioate
  modified_base 22: mod_base = OTHER; note = 2'-O-methyladenosine-3'-phosphorothioate
  modified_base 23: mod_base = OTHER; note = 2'-O-methylcytidine
ttgcgagtaccttctttgcccac

SEQ ID NO: 1036 - RNA, 23 nt, synthetic construct
  source 1..23: mol_type = other RNA
  modified_base 1: mod_base = OTHER; note = 2'-O-methyluridine-3'-phosphorothioate 5'-(E)-Vinylphosphonate
  modified_base 2: mod_base = OTHER; note = 2'-deoxy-2'-fluorouridine-3'-phosphorothioate
  modified_base 3: mod_base = OTHER; note = 2'-O-methyluridine-3'-phosphate
  modified_base 4: mod_base = OTHER; note = 2'-O-methylcytidine-3'-phosphate
  modified_base 5: mod_base = OTHER; note = 2'-O-methyladenosine-3'-phosphate
  modified_base 6: mod_base = OTHER; note = 2'-deoxy-2'-fluorouridine-3'-phosphate
  modified_base 7: mod_base = OTHER; note = 2'-O-methylguanosine-3'-phosphate
  modified_base 8: mod_base = OTHER; note = 2'-deoxy-2'-fluorocytidine-3'-phosphate
  modified_base 9: mod_base = OTHER; note = 2'-deoxy-2'-fluoroguanosine-3'-phosphate
  modified_base 10: mod_base = OTHER; note = 2'-O-methyladenosine-3'-phosphate
  modified_base 11: mod_base = OTHER; note = 2'-O-methylguanosine-3'-phosphate
  modified_base 12: mod_base = OTHER; note = 2'-O-methyluridine-3'-phosphate
  modified_base 13: mod_base = OTHER; note = 2'-O-methyladenosine-3'-phosphate
  modified_base 14: mod_base = OTHER; note = 2'-deoxy-2'-fluorocytidine-3'-phosphate
  modified_base 15: mod_base = OTHER; note = 2'-O-methylcytidine-3'-phosphate
  modified_base 16: mod_base = OTHER; note = 2'-deoxy-2'-fluorouridine-3'-phosphate
  modified_base 17: mod_base = OTHER; note = 2'-O-methyluridine-3'-phosphate
  modified_base 18: mod_base = OTHER; note = 2'-O-methylcytidine-3'-phosphate
  modified_base 19: mod_base = OTHER; note = 2'-O-methyluridine-3'-phosphate
  modified_base 20: mod_base = OTHER; note = 2'-O-methyluridine-3'-phosphate
  modified_base 21: mod_base = OTHER; note = 2'-O-methyluridine-3'-phosphorothioate
  modified_base 22: mod_base = OTHER; note = 2'-O-methylguanosine-3'-phosphorothioate
  modified_base 23: mod_base = OTHER; note = 2'-O-methylcytidine
tttcatgcgagtaccttctttgc

SEQ ID NO: 1037 - RNA, 23 nt, synthetic construct
  source 1..23: mol_type = other RNA
  modified_base 1: mod_base = OTHER; note = 2'-O-methyluridine-3'-phosphorothioate 5'-(E)-Vinylphosphonate
  modified_base 2: mod_base = OTHER; note = 2'-deoxy-2'-fluoroguanosine-3'-phosphorothioate
  modified_base 3: mod_base = OTHER; note = 2'-O-methyluridine-3'-phosphate
  modified_base 4: mod_base = OTHER; note = 2'-O-methyladenosine-3'-phosphate
  modified_base 5: mod_base = OTHER; note = 2'-O-methyluridine-3'-phosphate
  modified_base 6: mod_base = OTHER; note = 2'-deoxy-2'-fluoroguanosine-3'-phosphate
  modified_base 7: mod_base = OTHER; note = 2'-O-methyladenosine-3'-phosphate
  modified_base 8: mod_base = OTHER; note = 2'-deoxy-2'-fluorouridine-3'-phosphate
  modified_base 9: mod_base = OTHER; note = 2'-deoxy-2'-fluoroadenosine-3'-phosphate
  modified_base 10: mod_base = OTHER; note = 2'-O-methylguanosine-3'-phosphate
  modified_base 11: mod_base = OTHER; note = 2'-O-methyladenosine-3'-phosphate
  modified_base 12: mod_base = OTHER; note = 2'-O-methyladenosine-3'-phosphate
  modified_base 13: mod_base = OTHER; note = 2'-O-methylcytidine-3'-phosphate
  modified_base 14: mod_base = OTHER; note = 2'-deoxy-2'-fluorouridine-3'-phosphate
  modified_base 15: mod_base = OTHER; note = 2'-O-methyluridine-3'-phosphate
  modified_base 16: mod_base = OTHER; note = 2'-deoxy-2'-fluoroguanosine-3'-phosphate
  modified_base 17: mod_base = OTHER; note = 2'-O-methylcytidine-3'-phosphate
  modified_base 18: mod_base = OTHER; note = 2'-O-methylcytidine-3'-phosphate
  modified_base 19: mod_base = OTHER; note = 2'-O-methylcytidine-3'-phosphate
  modified_base 20: mod_base = OTHER; note = 2'-O-methylguanosine-3'-phosphate
  modified_base 21: mod_base = OTHER; note = 2'-O-methyladenosine-3'-phosphorothioate
  modified_base 22: mod_base = OTHER; note = 2'-O-methylguanosine-3'-phosphorothioate
  modified_base 23: mod_base = OTHER; note = 2'-O-methyladenosine
tgtatgatagaacttgcccgaga

SEQ ID NO: 1038 - RNA, 23 nt, synthetic construct
  source 1..23: mol_type = other RNA
  modified_base 1: mod_base = OTHER; note = 2'-O-methyluridine-3'-phosphorothioate 5'-(E)-Vinylphosphonate
  modified_base 2: mod_base = OTHER; note = 2'-deoxy-2'-fluoroadenosine-3'-phosphorothioate
  modified_base 3: mod_base = OTHER; note = 2'-O-methyladenosine-3'-phosphate
  modified_base 4: mod_base = OTHER; note = 2'-O-methylcytidine-3'-phosphate
  modified_base 5: mod_base = OTHER; note = 2'-O-methyluridine-3'-phosphate
  modified_base 6: mod_base = OTHER; note = 2'-deoxy-2'-fluoroguanosine-3'-phosphate
  modified_base 7: mod_base = OTHER; note = 2'-O-methyluridine-3'-phosphate
  modified_base 8: mod_base = OTHER; note = 2'-deoxy-2'-fluorouridine-3'-phosphate
  modified_base 9: mod_base = OTHER; note = 2'-deoxy-2'-fluorouridine-3'-phosphate
  modified_base 10: mod_base = OTHER; note = 2'-O-methylguanosine-3'-phosphate
  modified_base 11: mod_base = OTHER; note = 2'-O-methyluridine-3'-phosphate
  modified_base 12: mod_base = OTHER; note = 2'-O-methyluridine-3'-phosphate
  modified_base 13: mod_base = OTHER; note = 2'-O-methylguanosine-3'-phosphate
  modified_base 14: mod_base = OTHER; note = 2'-deoxy-2'-fluoroadenosine-3'-phosphate
  modified_base 15: mod_base = OTHER; note = 2'-O-methylguanosine-3'-phosphate
  modified_base 16: mod_base = OTHER; note = 2'-deoxy-2'-fluorocytidine-3'-phosphate
  modified_base 17: mod_base = OTHER; note = 2'-O-methylcytidine-3'-phosphate
  modified_base 18: mod_base = OTHER; note = 2'-O-methyluridine-3'-phosphate
  modified_base 19: mod_base = OTHER; note = 2'-O-methylcytidine-3'-phosphate
  modified_base 20: mod_base = OTHER; note = 2'-O-methyladenosine-3'-phosphate
  modified_base 21: mod_base = OTHER; note = 2'-O-methyluridine-3'-phosphorothioate
  modified_base 22: mod_base = OTHER; note = 2'-O-methylcytidine-3'-phosphorothioate
  modified_base 23: mod_base = OTHER; note = 2'-O-methyluridine
taactgtttgttgagcctcatct

SEQ ID NO: 1039 - RNA, 23 nt, synthetic construct
  source 1..23: mol_type = other RNA
  modified_base 1: mod_base = OTHER; note = 2'-O-methyluridine-3'-phosphorothioate 5'-(E)-Vinylphosphonate
  modified_base 2: mod_base = OTHER; note = 2'-deoxy-2'-fluoroadenosine-3'-phosphorothioate
  modified_base 3: mod_base = OTHER; note = 2'-O-methyluridine-3'-phosphate
  modified_base 4: mod_base = OTHER; note = 2'-O-methyluridine-3'-phosphate
  modified_base 5: mod_base = OTHER; note = 2'-O-methyladenosine-3'-phosphate
  modified_base 6: mod_base = OTHER; note = 2'-deoxy-2'-fluorouridine-3'-phosphate
  modified_base 7: mod_base = OTHER; note = 2'-O-methyladenosine-3'-phosphate
  modified_base 8: mod_base = OTHER; note = 2'-deoxy-2'-fluoroguanosine-3'-phosphate
  modified_base 9: mod_base = OTHER; note = 2'-deoxy-2'-fluoroadenosine-3'-phosphate
  modified_base 10: mod_base = OTHER; note = 2'-O-methyladenosine-3'-phosphate
  modified_base 11: mod_base = OTHER; note = 2'-O-methylguanosine-3'-phosphate
  modified_base 12: mod_base = OTHER; note = 2'-O-methyladenosine-3'-phosphate
  modified_base 13: mod_base = OTHER; note = 2'-O-methyluridine-3'-phosphate
  modified_base 14: mod_base = OTHER; note = 2'-deoxy-2'-fluorocytidine-3'-phosphate
  modified_base 15: mod_base = OTHER; note = 2'-O-methylguanosine-3'-phosphate
  modified_base 16: mod_base = OTHER; note = 2'-deoxy-2'-fluorouridine-3'-phosphate
  modified_base 17: mod_base = OTHER; note = 2'-O-methylguanosine-3'-phosphate
  modified_base 18: mod_base = OTHER; note = 2'-O-methyluridine-3'-phosphate
  modified_base 19: mod_base = OTHER; note = 2'-O-methylguanosine-3'-phosphate
  modified_base 20: mod_base = OTHER; note = 2'-O-methylguanosine-3'-phosphate
  modified_base 21: mod_base = OTHER; note = 2'-O-methylguanosine-3'-phosphorothioate
  modified_base 22: mod_base = OTHER; note = 2'-O-methyluridine-3'-phosphorothioate
  modified_base 23: mod_base = OTHER; note = 2'-O-methylguanosine
tattatagaagatcgtgtgggtg

SEQ ID NO: 1040 - RNA, 23 nt, synthetic construct
  source 1..23: mol_type = other RNA
  modified_base 1: mod_base = OTHER; note = 2'-O-methyluridine-3'-phosphorothioate 5'-(E)-Vinylphosphonate
  modified_base 2: mod_base = OTHER; note = 2'-deoxy-2'-fluorocytidine-3'-phosphorothioate
  modified_base 3: mod_base = OTHER; note = 2'-O-methyladenosine-3'-phosphate
  modified_base 4: mod_base = OTHER; note = 2'-O-methyluridine-3'-phosphate
  modified_base 5: mod_base = OTHER; note = 2'-O-methyluridine-3'-phosphate
  modified_base 6: mod_base = OTHER; note = 2'-deoxy-2'-fluoroadenosine-3'-phosphate
  modified_base 7: mod_base = OTHER; note = 2'-O-methyluridine-3'-phosphate
  modified_base 8: mod_base = OTHER; note = 2'-deoxy-2'-fluoroadenosine-3'-phosphate
  modified_base 9: mod_base = OTHER; note = 2'-deoxy-2'-fluoroguanosine-3'-phosphate
  modified_base 10: mod_base = OTHER; note = 2'-O-methyladenosine-3'-phosphate
  modified_base 11: mod_base = OTHER; note = 2'-O-methyladenosine-3'-phosphate
  modified_base 12: mod_base = OTHER; note = 2'-O-methylguanosine-3'-phosphate
  modified_base 13: mod_base = OTHER; note = 2'-O-methyladenosine-3'-phosphate
  modified_base 14: mod_base = OTHER; note = 2'-deoxy-2'-fluorouridine-3'-phosphate
  modified_base 15: mod_base = OTHER; note = 2'-O-methylcytidine-3'-phosphate
  modified_base 16: mod_base = OTHER; note = 2'-deoxy-2'-fluoroguanosine-3'-phosphate
  modified_base 17: mod_base = OTHER; note = 2'-O-methyluridine-3'-phosphate
  modified_base 18: mod_base = OTHER; note = 2'-O-methylguanosine-3'-phosphate
  modified_base 19: mod_base = OTHER; note = 2'-O-methyluridine-3'-phosphate
  modified_base 20: mod_base = OTHER; note = 2'-O-methylguanosine-3'-phosphate
  modified_base 21: mod_base = OTHER; note = 2'-O-methylguanosine-3'-phosphorothioate
  modified_base 22: mod_base = OTHER; note = 2'-O-methylguanosine-3'-phosphorothioate
  modified_base 23: mod_base = OTHER; note = 2'-O-methyluridine
tcattatagaagatcgtgtgggt

SEQ ID NO: 1041 - RNA, 23 nt, synthetic construct
  source 1..23: mol_type = other RNA
  modified_base 1: mod_base = OTHER; note = 2'-O-methyluridine-3'-phosphorothioate 5'-(E)-Vinylphosphonate
  modified_base 2: mod_base = OTHER; note = 2'-deoxy-2'-fluoroadenosine-3'-phosphorothioate
  modified_base 3: mod_base = OTHER; note = 2'-O-methylcytidine-3'-phosphate
  modified_base 4: mod_base = OTHER; note = 2'-O-methyluridine-3'-phosphate
  modified_base 5: mod_base = OTHER; note = 2'-O-methylcytidine-3'-phosphate
  modified_base 6: mod_base = OTHER; note = 2'-deoxy-2'-fluoroadenosine-3'-phosphate
  modified_base 7: mod_base = OTHER; note = 2'-O-methyluridine-3'-phosphate
  modified_base 8: mod_base = OTHER; note = 2'-deoxy-2'-fluorouridine-3'-phosphate
  modified_base 9: mod_base = OTHER; note = 2'-deoxy-2'-fluoroadenosine-3'-phosphate
  modified_base 10: mod_base = OTHER; note = 2'-O-methyluridine-3'-phosphate
  modified_base 11: mod_base = OTHER; note = 2'-O-methyladenosine-3'-phosphate
  modified_base 12: mod_base = OTHER; note = 2'-O-methylguanosine-3'-phosphate
  modified_base 13: mod_base = OTHER; note = 2'-O-methyladenosine-3'-phosphate
  modified_base 14: mod_base = OTHER; note = 2'-deoxy-2'-fluoroadenosine-3'-phosphate
  modified_base 15: mod_base = OTHER; note = 2'-O-methylguanosine-3'-phosphate
  modified_base 16: mod_base = OTHER; note = 2'-deoxy-2'-fluoroadenosine-3'-phosphate
  modified_base 17: mod_base = OTHER; note = 2'-O-methyluridine-3'-phosphate
  modified_base 18: mod_base = OTHER; note = 2'-O-methylcytidine-3'-phosphate
  modified_base 19: mod_base = OTHER; note = 2'-O-methylguanosine-3'-phosphate
  modified_base 20: mod_base = OTHER; note = 2'-O-methyluridine-3'-phosphate
  modified_base 21: mod_base = OTHER; note = 2'-O-methylguanosine-3'-phosphorothioate
  modified_base 22: mod_base = OTHER; note = 2'-O-methyluridine-3'-phosphorothioate
  modified_base 23: mod_base = OTHER; note = 2'-O-methylguanosine
tactcattatagaagatcgtgtg

SEQ ID NO: 1042 - RNA, 23 nt, synthetic construct
  source 1..23: mol_type = other RNA
  modified_base 1: mod_base = OTHER; note = 2'-O-methyluridine-3'-phosphorothioate 5'-(E)-Vinylphosphonate
  modified_base 2: mod_base = OTHER; note = 2'-deoxy-2'-fluorouridine-3'-phosphorothioate
  modified_base 3: mod_base = OTHER; note = 2'-O-methylguanosine-3'-phosphate
  modified_base 4: mod_base = OTHER; note = 2'-O-methylcytidine-3'-phosphate
  modified_base 5: mod_base = OTHER; note = 2'-O-methyluridine-3'-phosphate
  modified_base 6: mod_base = OTHER; note = 2'-deoxy-2'-fluorouridine-3'-phosphate
  modified_base 7: mod_base = OTHER; note = 2'-O-methylcytidine-3'-phosphate
  modified_base 8: mod_base = OTHER; note = 2'-deoxy-2'-fluoroguanosine-3'-phosphate
  modified_base 9: mod_base = OTHER; note = 2'-deoxy-2'-fluoroadenosine-3'-phosphate
  modified_base 10: mod_base = OTHER; note = 2'-O-methyluridine-3'-phosphate
  modified_base 11: mod_base = OTHER; note = 2'-O-methylcytidine-3'-phosphate
  modified_base 12: mod_base = OTHER; note = 2'-O-methyluridine-3'-phosphate
  modified_base 13: mod_base = OTHER; note = 2'-O-methyladenosine-3'-phosphate
  modified_base 14: mod_base = OTHER; note = 2'-deoxy-2'-fluoroguanosine-3'-phosphate
  modified_base 15: mod_base = OTHER; note = 2'-O-methyluridine-3'-phosphate
  modified_base 16: mod_base = OTHER; note = 2'-deoxy-2'-fluorouridine-3'-phosphate
  modified_base 17: mod_base = OTHER; note = 2'-O-methylcytidine-3'-phosphate
  modified_base 18: mod_base = OTHER; note = 2'-O-methyladenosine-3'-phosphate
  modified_base 19: mod_base = OTHER; note = 2'-O-methylcytidine-3'-phosphate
  modified_base 20: mod_base = OTHER; note = 2'-O-methylguanosine-3'-phosphate
  modified_base 21: mod_base = OTHER; note = 2'-O-methyladenosine-3'-phosphorothioate
  modified_base 22: mod_base = OTHER; note = 2'-O-methylguanosine-3'-phosphorothioate
  modified_base 23: mod_base = OTHER; note = 2'-O-methyladenosine
ttgcttcgatctagttcacgaga

SEQ ID NO: 1043 - RNA, 23 nt, synthetic construct
  source 1..23: mol_type = other RNA
  modified_base 1: mod_base = OTHER; note = 2'-O-methyluridine-3'-phosphorothioate 5'-(E)-Vinylphosphonate
  modified_base 2: mod_base = OTHER; note = 2'-deoxy-2'-fluoroadenosine-3'-phosphorothioate
  modified_base 3: mod_base = OTHER; note = 2'-O-methylcytidine-3'-phosphate
  modified_base 4: mod_base = OTHER; note = 2'-O-methyluridine-3'-phosphate
  modified_base 5: mod_base = OTHER; note = 2'-O-methylguanosine-3'-phosphate
  modified_base 6: mod_base = OTHER; note = 2'-deoxy-2'-fluoroadenosine-3'-phosphate
  modified_base 7: mod_base = OTHER; note = 2'-O-methyluridine-3'-phosphate
  modified_base 8: mod_base = OTHER; note = 2'-deoxy-2'-fluorocytidine-3'-phosphate
  modified_base 9: mod_base = OTHER; note = 2'-deoxy-2'-fluoroguanosine-3'-phosphate
  modified_base 10: mod_base = OTHER; note = 2'-O-methylguanosine-3'-phosphate
  modified_base 11: mod_base = OTHER; note = 2'-O-methyladenosine-3'-phosphate
  modified_base 12: mod_base = OTHER; note = 2'-O-methyluridine-3'-phosphate
  modified_base 13: mod_base = OTHER; note = 2'-O-methyluridine-3'-phosphate
  modified_base 14: mod_base = OTHER; note = 2'-deoxy-2'-fluoroadenosine-3'-phosphate
  modified_base 15: mod_base = OTHER; note = 2'-O-methyladenosine-3'-phosphate
  modified_base 16: mod_base = OTHER; note = 2'-deoxy-2'-fluoroguanosine-3'-phosphate
  modified_base 17: mod_base = OTHER; note = 2'-O-methylcytidine-3'-phosphate
  modified_base 18: mod_base = OTHER; note = 2'-O-methyladenosine-3'-phosphate
  modified_base 19: mod_base = OTHER; note = 2'-O-methylguanosine-3'-phosphate
  modified_base 20: mod_base = OTHER; note = 2'-O-methylcytidine-3'-phosphate
  modified_base 21: mod_base = OTHER; note = 2'-O-methyladenosine-3'-phosphorothioate
  modified_base 22: mod_base = OTHER; note = 2'-O-methylcytidine-3'-phosphorothioate
  modified_base 23: mod_base = OTHER; note = 2'-O-methyluridine
tactgatcggattaagcagcact

SEQ ID NO: 1044 - RNA, 23 nt, synthetic construct
  source 1..23: mol_type = other RNA
  modified_base 1: mod_base = OTHER; note = 2'-O-methyluridine-3'-phosphorothioate 5'-(E)-Vinylphosphonate
  modified_base 2: mod_base = OTHER; note = 2'-deoxy-2'-fluorocytidine-3'-phosphorothioate
  modified_base 3: mod_base = OTHER; note = 2'-O-methyladenosine-3'-phosphate
  modified_base 4: mod_base = OTHER; note = 2'-O-methyluridine-3'-phosphate
  modified_base 5: mod_base = OTHER; note = 2'-O-methyladenosine-3'-phosphate
  modified_base 6: mod_base = OTHER; note = 2'-deoxy-2'-fluoroadenosine-3'-phosphate
  modified_base 7: mod_base = OTHER; note = 2'-O-methyladenosine-3'-phosphate
  modified_base 8: mod_base = OTHER; note = 2'-deoxy-2'-fluoroguanosine-3'-phosphate
  modified_base 9: mod_base = OTHER; note = 2'-deoxy-2'-fluoroadenosine-3'-phosphate
  modified_base 10: mod_base = OTHER; note = 2'-O-methylcytidine-3'-phosphate
  modified_base 11: mod_base = OTHER; note = 2'-O-methyladenosine-3'-phosphate
  modified_base 12: mod_base = OTHER; note = 2'-O-methylcytidine-3'-phosphate
  modified_base 13: mod_base = OTHER; note = 2'-O-methyluridine-3'-phosphate
  modified_base 14: mod_base = OTHER; note = 2'-deoxy-2'-fluoroguanosine-3'-phosphate
  modified_base 15: mod_base = OTHER; note = 2'-O-methyladenosine-3'-phosphate
  modified_base 16: mod_base = OTHER; note = 2'-deoxy-2'-fluorouridine-3'-phosphate
  modified_base 17: mod_base = OTHER; note = 2'-O-methylcytidine-3'-phosphate
  modified_base 18: mod_base = OTHER; note = 2'-O-methylguanosine-3'-phosphate
  modified_base 19: mod_base = OTHER; note = 2'-O-methylguanosine-3'-phosphate
  modified_base 20: mod_base = OTHER; note = 2'-O-methyladenosine-3'-phosphate
  modified_base 21: mod_base = OTHER; note = 2'-O-methyluridine-3'-phosphorothioate
  modified_base 22: mod_base = OTHER; note = 2'-O-methyluridine-3'-phosphorothioate
  modified_base 23: mod_base = OTHER; note = 2'-O-methyladenosine
tcataaagacactgatcggatta

SEQ ID NO: 1045 - RNA, 23 nt, synthetic construct
  source 1..23: mol_type = other RNA
  modified_base 1: mod_base = OTHER; note = 2'-O-methyluridine-3'-phosphorothioate 5'-(E)-Vinylphosphonate
  modified_base 2: mod_base = OTHER; note = 2'-deoxy-2'-fluorouridine-3'-phosphorothioate
  modified_base 3: mod_base = OTHER; note = 2'-O-methylcytidine-3'-phosphate
  modified_base 4: mod_base = OTHER; note = 2'-O-methyladenosine-3'-phosphate
  modified_base 5: mod_base = OTHER; note = 2'-O-methyluridine-3'-phosphate
  modified_base 6: mod_base = OTHER; note = 2'-deoxy-2'-fluoroadenosine-3'-phosphate
  modified_base 7: mod_base = OTHER; note = 2'-O-methyladenosine-3'-phosphate
  modified_base 8: mod_base = OTHER; note = 2'-deoxy-2'-fluoroadenosine-3'-phosphate
  modified_base 9: mod_base = OTHER; note = 2'-deoxy-2'-fluoroguanosine-3'-phosphate
  modified_base 10: mod_base = OTHER; note = 2'-O-methyladenosine-3'-phosphate
  modified_base 11: mod_base = OTHER; note = 2'-O-methylcytidine-3'-phosphate
  modified_base 12: mod_base = OTHER; note = 2'-O-methyladenosine-3'-phosphate
  modified_base 13: mod_base = OTHER; note = 2'-O-methylcytidine-3'-phosphate
  modified_base 14: mod_base = OTHER; note = 2'-deoxy-2'-fluorouridine-3'-phosphate
  modified_base 15: mod_base = OTHER; note = 2'-O-methylguanosine-3'-phosphate
  modified_base 16: mod_base = OTHER; note = 2'-deoxy-2'-fluoroadenosine-3'-phosphate
  modified_base 17: mod_base = OTHER; note = 2'-O-methyluridine-3'-phosphate
  modified_base 18: mod_base = OTHER; note = 2'-O-methylcytidine-3'-phosphate
  modified_base 19: mod_base = OTHER; note = 2'-O-methylguanosine-3'-phosphate
  modified_base 20: mod_base = OTHER; note = 2'-O-methylguanosine-3'-phosphate
  modified_base 21: mod_base = OTHER; note = 2'-O-methyladenosine-3'-phosphorothioate
  modified_base 22: mod_base = OTHER; note = 2'-O-methyluridine-3'-phosphorothioate
  modified_base 23: mod_base = OTHER; note = 2'-O-methyluridine
ttcataaagacactgatcggatt

SEQ ID NO: 1046 - RNA, 23 nt, synthetic construct
  source 1..23: mol_type = other RNA
  modified_base 1: mod_base = OTHER; note = 2'-O-methyluridine-3'-phosphorothioate 5'-(E)-Vinylphosphonate
  modified_base 2: mod_base = OTHER; note = 2'-deoxy-2'-fluorocytidine-3'-phosphorothioate
  modified_base 3: mod_base = OTHER; note = 2'-O-methylguanosine-3'-phosphate
  modified_base 4: mod_base = OTHER; note = 2'-O-methyluridine-3'-phosphate
  modified_base 5: mod_base = OTHER; note = 2'-O-methyluridine-3'-phosphate
  modified_base 6: mod_base = OTHER; note = 2'-deoxy-2'-fluorocytidine-3'-phosphate
  modified_base 7: mod_base = OTHER; note = 2'-O-methylcytidine-3'-phosphate
  modified_base 8: mod_base = OTHER; note = 2'-deoxy-2'-fluorouridine-3'-phosphate
  modified_base 9: mod_base = OTHER; note = 2'-deoxy-2'-fluoroguanosine-3'-phosphate
  modified_base 10: mod_base = OTHER; note = 2'-O-methyladenosine-3'-phosphate
  modified_base 11: mod_base = OTHER; note = 2'-O-methylguanosine-3'-phosphate
  modified_base 12: mod_base = OTHER; note = 2'-O-methylguanosine-3'-phosphate
  modified_base 13: mod_base = OTHER; note = 2'-O-methyladenosine-3'-phosphate
  modified_base 14: mod_base = OTHER; note = 2'-deoxy-2'-fluoroadenosine-3'-phosphate
  modified_base 15: mod_base = OTHER; note = 2'-O-methyladenosine-3'-phosphate
  modified_base 16: mod_base = OTHER; note = 2'-deoxy-2'-fluoroadenosine-3'-phosphate
  modified_base 17: mod_base = OTHER; note = 2'-O-methyladenosine-3'-phosphate
  modified_base 18: mod_base = OTHER; note = 2'-O-methylguanosine-3'-phosphate
  modified_base 19: mod_base = OTHER; note = 2'-O-methyluridine-3'-phosphate
  modified_base 20: mod_base = OTHER; note = 2'-O-methyluridine-3'-phosphate
  modified_base 21: mod_base = OTHER; note = 2'-O-methylcytidine-3'-phosphorothioate
  modified_base 22: mod_base = OTHER; note = 2'-O-methyladenosine-3'-phosphorothioate
  modified_base 23: mod_base = OTHER; note = 2'-O-methyladenosine
tcgttcctgaggaaaaagttcaa

SEQ ID NO: 1047 - RNA, 23 nt, synthetic construct
  source 1..23: mol_type = other RNA
  modified_base 1: mod_base = OTHER; note = 2'-O-methyluridine-3'-phosphorothioate 5'-(E)-Vinylphosphonate
  modified_base 2: mod_base = OTHER; note = 2'-deoxy-2'-fluorouridine-3'-phosphorothioate
  modified_base 3: mod_base = OTHER; note = 2'-O-methylcytidine-3'-phosphate
  modified_base 4: mod_base = OTHER; note = 2'-O-methylguanosine-3'-phosphate
  modified_base 5: mod_base = OTHER; note = 2'-O-methyluridine-3'-phosphate
  modified_base 6: mod_base = OTHER; note = 2'-deoxy-2'-fluorouridine-3'-phosphate
  modified_base 7: mod_base = OTHER; note = 2'-O-methylcytidine-3'-phosphate
  modified_base 8: mod_base = OTHER; note = 2'-deoxy-2'-fluorocytidine-3'-phosphate
  modified_base 9: mod_base = OTHER; note = 2'-deoxy-2'-fluorouridine-3'-phosphate
  modified_base 10: mod_base = OTHER; note = 2'-O-methylguanosine-3'-phosphate
  modified_base 11: mod_base = OTHER; note = 2'-O-methyladenosine-3'-phosphate
  modified_base 12: mod_base = OTHER; note = 2'-O-methylguanosine-3'-phosphate
  modified_base 13: mod_base = OTHER; note = 2'-O-methylguanosine-3'-phosphate
  modified_base 14: mod_base = OTHER; note = 2'-deoxy-2'-fluoroadenosine-3'-phosphate
  modified_base 15: mod_base = OTHER; note = 2'-O-methyladenosine-3'-phosphate
  modified_base 16: mod_base = OTHER; note = 2'-deoxy-2'-fluoroadenosine-3'-phosphate
  modified_base 17: mod_base = OTHER; note = 2'-O-methyladenosine-3'-phosphate
  modified_base 18: mod_base = OTHER; note = 2'-O-methyladenosine-3'-phosphate
  modified_base 19: mod_base = OTHER; note = 2'-O-methylguanosine-3'-phosphate
  modified_base 20: mod_base = OTHER; note = 2'-O-methyluridine-3'-phosphate
  modified_base 21: mod_base = OTHER; note = 2'-O-methyluridine-3'-phosphorothioate
  modified_base 22: mod_base = OTHER; note = 2'-O-methylcytidine-3'-phosphorothioate
  modified_base 23: mod_base = OTHER; note = 2'-O-methyladenosine
ttcgttcctgaggaaaaagttca

SEQ ID NO: 1048 - RNA, 23 nt, synthetic construct
  source 1..23: mol_type = other RNA
  modified_base 1: mod_base = OTHER; note = 2'-O-methyluridine-3'-phosphorothioate 5'-(E)-Vinylphosphonate
  modified_base 2: mod_base = OTHER; note = 2'-deoxy-2'-fluorocytidine-3'-phosphorothioate
  modified_base 3: mod_base = OTHER; note = 2'-O-methylcytidine-3'-phosphate
  modified_base 4: mod_base = OTHER; note = 2'-O-methyladenosine-3'-phosphate
  modified_base 5: mod_base = OTHER; note = 2'-O-methyluridine-3'-phosphate
  modified_base 6: mod_base = OTHER; note = 2'-deoxy-2'-fluorouridine-3'-phosphate
  modified_base 7: mod_base = OTHER; note = 2'-O-methylguanosine-3'-phosphate
  modified_base 8: mod_base = OTHER; note = 2'-deoxy-2'-fluoroadenosine-3'-phosphate
  modified_base 9: mod_base = OTHER; note = 2'-deoxy-2'-fluoroadenosine-3'-phosphate
  modified_base 10: mod_base = OTHER; note = 2'-O-methylguanosine-3'-phosphate
  modified_base 11: mod_base = OTHER; note = 2'-O-methyladenosine-3'-phosphate
  modified_base 12: mod_base = OTHER; note = 2'-O-methyladenosine-3'-phosphate
  modified_base 13: mod_base = OTHER; note = 2'-O-methylcytidine-3'-phosphate
  modified_base 14: mod_base = OTHER; note = 2'-deoxy-2'-fluorouridine-3'-phosphate
  modified_base 15: mod_base = OTHER; note = 2'-O-methylguanosine-3'-phosphate
  modified_base 16: mod_base = OTHER; note = 2'-deoxy-2'-fluoroadenosine-3'-phosphate
  modified_base 17: mod_base = OTHER; note = 2'-O-methyladenosine-3'-phosphate
  modified_base 18: mod_base = OTHER; note = 2'-O-methyluridine-3'-phosphate
  modified_base 19: mod_base = OTHER; note = 2'-O-methylcytidine-3'-phosphate
  modified_base 20: mod_base = OTHER; note = 2'-O-methyluridine-3'-phosphate
  modified_base 21: mod_base = OTHER; note = 2'-O-methylcytidine-3'-phosphorothioate
  modified_base 22: mod_base = OTHER; note = 2'-O-methylcytidine-3'-phosphorothioate
  modified_base 23: mod_base = OTHER; note = 2'-O-methyluridine
tccattgaagaactgaatctcct

SEQ ID NO: 1049 - RNA, 23 nt, synthetic construct
  source 1..23: mol_type = other RNA
  modified_base 1: mod_base = OTHER; note = 2'-O-methyluridine-3'-phosphorothioate 5'-(E)-Vinylphosphonate
  modified_base 2: mod_base = OTHER; note = 2'-deoxy-2'-fluoroadenosine-3'-phosphorothioate
  modified_base 3: mod_base = OTHER; note = 2'-O-methylguanosine-3'-phosphate
  modified_base 4: mod_base = OTHER; note = 2'-O-methylguanosine-3'-phosphate
  modified_base 5: mod_base = OTHER; note = 2'-O-methyluridine-3'-phosphate
  modified_base 6: mod_base = OTHER; note = 2'-deoxy-2'-fluoroguanosine-3'-phosphate
  modified_base 7: mod_base = OTHER; note = 2'-O-methyluridine-3'-phosphate
  modified_base 8: mod_base = OTHER; note = 2'-deoxy-2'-fluoroadenosine-3'-phosphate
  modified_base 9: mod_base = OTHER; note = 2'-deoxy-2'-fluoroguanosine-3'-phosphate
  modified_base 10: mod_base = OTHER; note = 2'-O-methyluridine-3'-phosphate
  modified_base 11: mod_base = OTHER; note = 2'-O-methyluridine-3'-phosphate
  modified_base 12: mod_base = OTHER; note = 2'-O-methylcytidine-3'-phosphate
  modified_base 13: mod_base = OTHER; note = 2'-O-methyladenosine-3'-phosphate
  modified_base 14: mod_base = OTHER; note = 2'-deoxy-2'-fluoroguanosine-3'-phosphate
  modified_base 15: mod_base = OTHER; note = 2'-O-methyladenosine-3'-phosphate
  modified_base 16: mod_base = OTHER; note = 2'-deoxy-2'-fluoroguanosine-3'-phosphate
  modified_base 17: mod_base = OTHER; note = 2'-O-methylcytidine-3'-phosphate
  modified_base 18: mod_base = OTHER; note = 2'-O-methyladenosine-3'-phosphate
  modified_base 19: mod_base = OTHER; note = 2'-O-methyladenosine-3'-phosphate
  modified_base 20: mod_base = OTHER; note = 2'-O-methyluridine-3'-phosphate
  modified_base 21: mod_base = OTHER; note = 2'-O-methylguanosine-3'-phosphorothioate
  modified_base 22: mod_base = OTHER; note = 2'-O-methylguanosine-3'-phosphorothioate
  modified_base 23: mod_base = OTHER; note = 2'-O-methylguanosine
taggtgtagttcagagcaatggg

SEQ ID NO: 1050 - RNA, 23 nt, synthetic construct
  source 1..23: mol_type = other RNA
  modified_base 1: mod_base = OTHER; note = 2'-O-methyluridine-3'-phosphorothioate 5'-(E)-Vinylphosphonate
  modified_base 2: mod_base = OTHER; note = 2'-deoxy-2'-fluoroadenosine-3'-phosphorothioate
  modified_base 3: mod_base = OTHER; note = 2'-O-methyladenosine-3'-phosphate
  modified_base 4: mod_base = OTHER; note = 2'-O-methylguanosine-3'-phosphate
  modified_base 5: mod_base = OTHER; note = 2'-O-methylguanosine-3'-phosphate
  modified_base 6: mod_base = OTHER; note = 2'-deoxy-2'-fluorouridine-3'-phosphate
  modified_base 7: mod_base = OTHER; note = 2'-O-methylguanosine-3'-phosphate
  modified_base 8: mod_base = OTHER; note = 2'-deoxy-2'-fluorouridine-3'-phosphate
  modified_base 9: mod_base = OTHER; note = 2'-deoxy-2'-fluoroadenosine-3'-phosphate
  modified_base 10: mod_base = OTHER; note = 2'-O-methylguanosine-3'-phosphate
  modified_base 11: mod_base = OTHER; note = 2'-O-methyluridine-3'-phosphate
  modified_base 12: mod_base = OTHER; note = 2'-O-methyluridine-3'-phosphate
  modified_base 13: mod_base = OTHER; note = 2'-O-methylcytidine-3'-phosphate
  modified_base 14: mod_base = OTHER; note = 2'-deoxy-2'-fluoroadenosine-3'-phosphate
  modified_base 15: mod_base = OTHER; note = 2'-O-methylguanosine-3'-phosphate
  modified_base 16: mod_base = OTHER; note = 2'-deoxy-2'-fluoroadenosine-3'-phosphate
  modified_base 17: mod_base = OTHER; note = 2'-O-methylguanosine-3'-phosphate
  modified_base 18: mod_base = OTHER; note = 2'-O-methylcytidine-3'-phosphate
  modified_base 19: mod_base = OTHER; note = 2'-O-methyladenosine-3'-phosphate
  modified_base 20: mod_base = OTHER; note = 2'-O-methyladenosine-3'-phosphate
  modified_base 21: mod_base = OTHER; note = 2'-O-methyluridine-3'-phosphorothioate
  modified_base 22: mod_base = OTHER; note = 2'-O-methylguanosine-3'-phosphorothioate
  modified_base 23: mod_base = OTHER; note = 2'-O-methylguanosine
taaggtgtagttcagagcaatgg

SEQ ID NO: 1051 - RNA, 23 nt, synthetic construct
  source 1..23: mol_type = other RNA
  modified_base 1: mod_base = OTHER; note = 2'-O-methyluridine-3'-phosphorothioate 5'-(E)-Vinylphosphonate
  modified_base 2: mod_base = OTHER; note = 2'-deoxy-2'-fluorouridine-3'-phosphorothioate
  modified_base 3: mod_base = OTHER; note = 2'-O-methylguanosine-3'-phosphate
  modified_base 4: mod_base = OTHER; note = 2'-O-methylguanosine-3'-phosphate
  modified_base 5: mod_base = OTHER; note = 2'-O-methyluridine-3'-phosphate
  modified_base 6: mod_base = OTHER; note = 2'-deoxy-2'-fluoroadenosine-3'-phosphate
  modified_base 7: mod_base = OTHER; note = 2'-O-methylguanosine-3'-phosphate
  modified_base 8: mod_base = OTHER; note = 2'-deoxy-2'-fluoroadenosine-3'-phosphate
  modified_base 9: mod_base = OTHER; note = 2'-deoxy-2'-fluoroadenosine-3'-phosphate
  modified_base 10: mod_base = OTHER; note = 2'-O-methylguanosine-3'-phosphate
  modified_base 11: mod_base = OTHER; note = 2'-O-methylguanosine-3'-phosphate
  modified_base 12: mod_base = OTHER; note = 2'-O-methyluridine-3'-phosphate
  modified_base 13: mod_base = OTHER; note = 2'-O-methylguanosine-3'-phosphate
  modified_base 14: mod_base = OTHER; note = 2'-deoxy-2'-fluorouridine-3'-phosphate
  modified_base 15: mod_base = OTHER; note = 2'-O-methyladenosine-3'-phosphate
  modified_base 16: mod_base = OTHER; note = 2'-deoxy-2'-fluoroguanosine-3'-phosphate
  modified_base 17: mod_base = OTHER; note = 2'-O-methyluridine-3'-phosphate
  modified_base 18: mod_base = OTHER; note = 2'-O-methyluridine-3'-phosphate
  modified_base 19: mod_base = OTHER; note = 2'-O-methylcytidine-3'-phosphate
  modified_base 20: mod_base = OTHER; note = 2'-O-methyladenosine-3'-phosphate
  modified_base 21: mod_base = OTHER; note = 2'-O-methylguanosine-3'-phosphorothioate
  modified_base 22: mod_base = OTHER; note = 2'-O-methyladenosine-3'-phosphorothioate
  modified_base 23: mod_base = OTHER; note = 2'-O-methylguanosine
ttggtagaaggtgtagttcagag

SEQ ID NO: 1052 - RNA, 23 nt, synthetic construct
  source 1..23: mol_type = other RNA
  modified_base 1: mod_base = OTHER; note = 2'-O-methyluridine-3'-phosphorothioate 5'-(E)-Vinylphosphonate
  modified_base 2: mod_base = OTHER; note = 2'-deoxy-2'-fluorocytidine-3'-phosphorothioate
  modified_base 3: mod_base = OTHER; note = 2'-O-methyluridine-3'-phosphate
  modified_base 4: mod_base = OTHER; note = 2'-O-methylguanosine-3'-phosphate
  modified_base 5: mod_base = OTHER; note = 2'-O-methylcytidine-3'-phosphate
  modified_base 6: mod_base = OTHER; note = 2'-deoxy-2'-fluoroadenosine-3'-phosphate
  modified_base 7: mod_base = OTHER; note = 2'-O-methyladenosine-3'-phosphate
  modified_base 8: mod_base = OTHER; note = 2'-deoxy-2'-fluoroguanosine-3'-phosphate
  modified_base 9: mod_base = OTHER; note = 2'-deoxy-2'-fluoroguanosine-3'-phosphate
  modified_base 10: mod_base = OTHER; note = 2'-O-methyladenosine-3'-phosphate
  modified_base 11: mod_base = OTHER; note = 2'-O-methylguanosine-3'-phosphate
  modified_base 12: mod_base = OTHER; note = 2'-O-methylcytidine-3'-phosphate
  modified_base 13: mod_base = OTHER; note = 2'-O-methylguanosine-3'-phosphate
  modified_base 14: mod_base = OTHER; note = 2'-deoxy-2'-fluoroadenosine-3'-phosphate
  modified_base 15: mod_base = OTHER; note = 2'-O-methyladenosine-3'-phosphate
  modified_base 16: mod_base = OTHER; note = 2'-deoxy-2'-fluoroguanosine-3'-phosphate
  modified_base 17: mod_base = OTHER; note = 2'-O-methyluridine-3'-phosphate
  modified_base 18: mod_base = OTHER; note = 2'-O-methyladenosine-3'-phosphate
  modified_base 19: mod_base = OTHER; note = 2'-O-methylguanosine-3'-phosphate
  modified_base 20: mod_base = OTHER; note = 2'-O-methylcytidine-3'-phosphate
  modified_base 21: mod_base = OTHER; note = 2'-O-methyladenosine-3'-phosphorothioate
  modified_base 22: mod_base = OTHER; note = 2'-O-methylguanosine-3'-phosphorothioate
  modified_base 23: mod_base = OTHER; note = 2'-O-methyladenosine
tctgcaaggagcgaagtagcaga

SEQ ID NO: 1053 - RNA, 23 nt, synthetic construct
  source 1..23: mol_type = other RNA
  modified_base 1: mod_base = OTHER; note = 2'-O-methyluridine-3'-phosphorothioate 5'-(E)-Vinylphosphonate
  modified_base 2: mod_base = OTHER; note = 2'-deoxy-2'-fluoroadenosine-3'-phosphorothioate
  modified_base 3: mod_base = OTHER; note = 2'-O-methyladenosine-3'-phosphate
  modified_base 4: mod_base = OTHER; note = 2'-O-methylcytidine-3'-phosphate
  modified_base 5: mod_base = OTHER; note = 2'-O-methyladenosine-3'-phosphate
  modified_base 6: mod_base = OTHER; note = 2'-deoxy-2'-fluoroadenosine-3'-phosphate
  modified_base 7: mod_base = OTHER; note = 2'-O-methylguanosine-3'-phosphate
  modified_base 8: mod_base = OTHER; note = 2'-deoxy-2'-fluoroadenosine-3'-phosphate
  modified_base 9: mod_base = OTHER; note = 2'-deoxy-2'-fluorocytidine-3'-phosphate
  modified_base 10: mod_base = OTHER; note = 2'-O-methyladenosine-3'-phosphate
  modified_base 11: mod_base = OTHER; note = 2'-O-methyladenosine-3'-phosphate
  modified_base 12: mod_base = OTHER; note = 2'-O-methylcytidine-3'-phosphate
  modified_base 13: mod_base = OTHER; note = 2'-O-methylguanosine-3'-phosphate
  modified_base 14: mod_base = OTHER; note = 2'-deoxy-2'-fluoroguanosine-3'-phosphate
  modified_base 15: mod_base = OTHER; note = 2'-O-methyluridine-3'-phosphate
  modified_base 16: mod_base = OTHER; note = 2'-deoxy-2'-fluorouridine-3'-phosphate
  modified_base 17: mod_base = OTHER; note = 2'-O-methylcytidine-3'-phosphate
  modified_base 18: mod_base = OTHER; note = 2'-O-methyluridine-3'-phosphate
  modified_base 19: mod_base = OTHER; note = 2'-O-methylguanosine-3'-phosphate
  modified_base 20: mod_base = OTHER; note = 2'-O-methylcytidine-3'-phosphate
  modified_base 21: mod_base = OTHER; note = 2'-O-methyladenosine-3'-phosphorothioate
  modified_base 22: mod_base = OTHER; note = 2'-O-methyladenosine-3'-phosphorothioate
  modified_base 23: mod_base = OTHER; note = 2'-O-methylguanosine
taacaagacaacggttctgcaag

SEQ ID NO: 1054 - RNA, 23 nt, synthetic construct
  source 1..23: mol_type = other RNA
  modified_base 1: mod_base = OTHER; note = 2'-O-methyluridine-3'-phosphorothioate 5'-(E)-Vinylphosphonate
  modified_base 2: mod_base = OTHER; note = 2'-deoxy-2'-fluoroadenosine-3'-phosphorothioate
  modified_base 3: mod_base = OTHER; note = 2'-O-methylguanosine-3'-phosphate
  modified_base 4: mod_base = OTHER; note = 2'-O-methyladenosine-3'-phosphate
  modified_base 5: mod_base = OTHER; note = 2'-O-methyladenosine-3'-phosphate
  modified_base 6: mod_base = OTHER; note = 2'-deoxy-2'-fluorouridine-3'-phosphate
  modified_base 7: mod_base = OTHER; note = 2'-O-methyladenosine-3'-phosphate
  modified_base 8: mod_base = OTHER; note = 2'-deoxy-2'-fluoroguanosine-3'-phosphate
  modified_base 9: mod_base = OTHER; note = 2'-deoxy-2'-fluorouridine-3'-phosphate
  modified_base 10: mod_base = OTHER; note = 2'-O-methyladenosine-3'-phosphate
  modified_base 11: mod_base = OTHER; note = 2'-O-methylguanosine-3'-phosphate
  modified_base 12: mod_base = OTHER; note = 2'-O-methylcytidine-3'-phosphate
  modified_base 13: mod_base = OTHER; note = 2'-O-methylcytidine-3'-phosphate
  modified_base 14: mod_base = OTHER; note = 2'-deoxy-2'-fluoroadenosine-3'-phosphate
  modified_base 15: mod_base = OTHER; note = 2'-O-methylguanosine-3'-phosphate
  modified_base 16: mod_base = OTHER; note = 2'-deoxy-2'-fluoroguanosine-3'-phosphate
  modified_base 17: mod_base = OTHER; note = 2'-O-methyladenosine-3'-phosphate
  modified_base 18: mod_base = OTHER; note = 2'-O-methyladenosine-3'-phosphate
  modified_base 19: mod_base = OTHER; note = 2'-O-methylcytidine-3'-phosphate
  modified_base 20: mod_base = OTHER; note = 2'-O-methyladenosine-3'-phosphate
  modified_base 21: mod_base = OTHER; note = 2'-O-methyladenosine-3'-phosphorothioate
  modified_base 22: mod_base = OTHER; note = 2'-O-methylguanosine-3'-phosphorothioate
  modified_base 23: mod_base = OTHER; note = 2'-O-methyladenosine
tagaatagtagccaggaacaaga

SEQ ID NO: 1055 - RNA, 23 nt, synthetic construct
  source 1..23: mol_type = other RNA
  modified_base 1: mod_base = OTHER; note = 2'-O-methyluridine-3'-phosphorothioate 5'-(E)-Vinylphosphonate
  modified_base 2: mod_base = OTHER; note = 2'-deoxy-2'-fluoroguanosine-3'-phosphorothioate
  modified_base 3: mod_base = OTHER; note = 2'-O-methyluridine-3'-phosphate
  modified_base 4: mod_base = OTHER; note = 2'-O-methyladenosine-3'-phosphate
  modified_base 5: mod_base = OTHER; note = 2'-O-methylguanosine-3'-phosphate
  modified_base 6: mod_base = OTHER; note = 2'-deoxy-2'-fluoroadenosine-3'-phosphate
  modified_base 7: mod_base = OTHER; note = 2'-O-methyladenosine-3'-phosphate
  modified_base 8: mod_base = OTHER; note = 2'-deoxy-2'-fluorouridine-3'-phosphate
  modified_base 9: mod_base = OTHER; note = 2'-deoxy-2'-fluoroadenosine-3'-phosphate
  modified_base 10: mod_base = OTHER; note = 2'-O-methylguanosine-3'-phosphate
  modified_base 11: mod_base = OTHER; note = 2'-O-methyluridine-3'-phosphate
  modified_base 12: mod_base = OTHER; note = 2'-O-methyladenosine-3'-phosphate
  modified_base 13: mod_base = OTHER; note = 2'-O-methylguanosine-3'-phosphate
  modified_base 14: mod_base = OTHER; note = 2'-deoxy-2'-fluorocytidine-3'-phosphate
  modified_base 15: mod_base = OTHER; note = 2'-O-methylcytidine-3'-phosphate
  modified_base 16: mod_base = OTHER; note = 2'-deoxy-2'-fluoroadenosine-3'-phosphate
  modified_base 17: mod_base = OTHER; note = 2'-O-methylguanosine-3'-phosphate
  modified_base 18: mod_base = OTHER; note = 2'-O-methylguanosine-3'-phosphate
  modified_base 19: mod_base = OTHER; note = 2'-O-methyladenosine-3'-phosphate
  modified_base 20: mod_base = OTHER; note = 2'-O-methyladenosine-3'-phosphate
  modified_base 21: mod_base = OTHER; note = 2'-O-methylcytidine-3'-phosphorothioate
  modified_base 22: mod_base = OTHER; note = 2'-O-methyladenosine-3'-phosphorothioate
  modified_base 23: mod_base = OTHER; note = 2'-O-methyladenosine
tgtagaatagtagccaggaacaa

SEQ ID NO: 1056 - RNA, 23 nt, synthetic construct
  source 1..23: mol_type = other RNA
  modified_base 1: mod_base = OTHER; note = 2'-O-methyluridine-3'-phosphorothioate 5'-(E)-Vinylphosphonate
  modified_base 2: mod_base = OTHER; note = 2'-deoxy-2'-fluorouridine-3'-phosphorothioate
  modified_base 3: mod_base = OTHER; note = 2'-O-methyladenosine-3'-phosphate
  modified_base 4: mod_base = OTHER; note = 2'-O-methyladenosine-3'-phosphate
  modified_base 5: mod_base = OTHER; note = 2'-O-methyluridine-3'-phosphate
  modified_base 6: mod_base = OTHER; note = 2'-deoxy-2'-fluorocytidine-3'-phosphate
  modified_base 7: mod_base = OTHER; note = 2'-O-methyladenosine-3'-phosphate
  modified_base 8: mod_base = OTHER; note = 2'-deoxy-2'-fluoroguanosine-3'-phosphate
  modified_base 9: mod_base = OTHER; note = 2'-deoxy-2'-fluorocytidine-3'-phosphate
  modified_base 10: mod_base = OTHER; note = 2'-O-methyladenosine-3'-phosphate
  modified_base 11: mod_base = OTHER; note = 2'-O-methyladenosine-3'-phosphate
  modified_base 12: mod_base = OTHER; note = 2'-O-methylcytidine-3'-phosphate
  modified_base 13: mod_base = OTHER; note = 2'-O-methyluridine-3'-phosphate
  modified_base 14: mod_base = OTHER; note = 2'-deoxy-2'-fluoroguanosine-3'-phosphate
  modified_base 15: mod_base = OTHER; note = 2'-O-methyluridine-3'-phosphate
  modified_base 16: mod_base = OTHER; note = 2'-deoxy-2'-fluorocytidine-3'-phosphate
  modified_base 17: mod_base = OTHER; note = 2'-O-methylcytidine-3'-phosphate
  modified_base 18: mod_base = OTHER; note = 2'-O-methyladenosine-3'-phosphate
  modified_base 19: mod_base = OTHER; note = 2'-O-methylguanosine-3'-phosphate
  modified_base 20: mod_base = OTHER; note = 2'-O-methyladenosine-3'-phosphate
  modified_base 21: mod_base = OTHER; note = 2'-O-methylguanosine-3'-phosphorothioate
  modified_base 22: mod_base = OTHER; note = 2'-O-methylguanosine-3'-phosphorothioate
  modified_base 23: mod_base = OTHER; note = 2'-O-methylguanosine
ttaatcagcaactgtccagaggg

SEQ ID NO: 1057 - RNA, 23 nt, synthetic construct
  source 1..23: mol_type = other RNA
  modified_base 1: mod_base = OTHER; note = 2'-O-methyluridine-3'-phosphorothioate 5'-(E)-Vinylphosphonate
  modified_base 2: mod_base = OTHER; note = 2'-deoxy-2'-fluoroadenosine-3'-phosphorothioate
  modified_base 3: mod_base = OTHER; note = 2'-O-methyluridine-3'-phosphate
  modified_base 4: mod_base = OTHER; note = 2'-O-methyladenosine-3'-phosphate
  modified_base 5: mod_base = OTHER; note = 2'-O-methyladenosine-3'-phosphate
  modified_base 6: mod_base = OTHER; note = 2'-deoxy-2'-fluorouridine-3'-phosphate
  modified_base 7: mod_base = OTHER; note = 2'-O-methylcytidine-3'-phosphate
  modified_base 8: mod_base = OTHER; note = 2'-deoxy-2'-fluoroadenosine-3'-phosphate
  modified_base 9: mod_base = OTHER; note = 2'-deoxy-2'-fluoroguanosine-3'-phosphate
  modified_base 10: mod_base = OTHER; note = 2'-O-methylcytidine-3'-phosphate
  modified_base 11: mod_base = OTHER; note = 2'-O-methyladenosine-3'-phosphate
  modified_base 12: mod_base = OTHER; note = 2'-O-methyladenosine-3'-phosphate
  modified_base 13: mod_base = OTHER; note = 2'-O-methylcytidine-3'-phosphate
  modified_base 14: mod_base = OTHER; note = 2'-deoxy-2'-fluorouridine-3'-phosphate
  modified_base 15: mod_base = OTHER; note = 2'-O-methylguanosine-3'-phosphate
  modified_base 16: mod_base = OTHER; note = 2'-deoxy-2'-fluorouridine-3'-phosphate
  modified_base 17: mod_base = OTHER; note = 2'-O-methylcytidine-3'-phosphate
  modified_base 18: mod_base = OTHER; note = 2'-O-methylcytidine-3'-phosphate
  modified_base 19: mod_base = OTHER; note = 2'-O-methyladenosine-3'-phosphate
  modified_base 20: mod_base = OTHER; note = 2'-O-methylguanosine-3'-phosphate
  modified_base 21: mod_base = OTHER; note = 2'-O-methyladenosine-3'-phosphorothioate
  modified_base 22: mod_base = OTHER; note = 2'-O-methylguanosine-3'-phosphorothioate
  modified_base 23: mod_base = OTHER; note = 2'-O-methylguanosine
tataatcagcaactgtccagagg

SEQ ID NO: 1058 - RNA, 23 nt, synthetic construct
  source 1..23: mol_type = other RNA
  modified_base 1: mod_base = OTHER; note = 2'-O-methyluridine-3'-phosphorothioate 5'-(E)-Vinylphosphonate
  modified_base 2: mod_base = OTHER; note = 2'-deoxy-2'-fluorocytidine-3'-phosphorothioate
  modified_base 3: mod_base = OTHER; note = 2'-O-methyladenosine-3'-phosphate
  modified_base 4: mod_base = OTHER; note = 2'-O-methyluridine-3'-phosphate
  modified_base 5: mod_base = OTHER; note = 2'-O-methyladenosine-3'-phosphate
  modified_base 6: mod_base = OTHER; note = 2'-deoxy-2'-fluoroadenosine-3'-phosphate
  modified_base 7: mod_base = OTHER; note = 2'-O-methyluridine-3'-phosphate
  modified_base 8: mod_base = OTHER; note = 2'-deoxy-2'-fluorocytidine-3'-phosphate
  modified_base 9: mod_base = OTHER; note = 2'-deoxy-2'-fluoroadenosine-3'-phosphate
  modified_base 10: mod_base = OTHER; note = 2'-O-methylguanosine-3'-phosphate
  modified_base 11: mod_base = OTHER; note = 2'-O-methylcytidine-3'-phosphate
  modified_base 12: mod_base = OTHER; note = 2'-O-methyladenosine-3'-phosphate
  modified_base 13: mod_base = OTHER; note = 2'-O-methyladenosine-3'-phosphate
  modified_base 14: mod_base = OTHER; note = 2'-deoxy-2'-fluorocytidine-3'-phosphate
  modified_base 15: mod_base = OTHER; note = 2'-O-methyluridine-3'-phosphate
  modified_base 16: mod_base = OTHER; note = 2'-deoxy-2'-fluoroguanosine-3'-phosphate
  modified_base 17: mod_base = OTHER; note = 2'-O-methyluridine-3'-phosphate
  modified_base 18: mod_base = OTHER; note = 2'-O-methylcytidine-3'-phosphate
  modified_base 19: mod_base = OTHER; note = 2'-O-methylcytidine-3'-phosphate
  modified_base 20: mod_base = OTHER; note = 2'-O-methyladenosine-3'-phosphate
  modified_base 21: mod_base = OTHER; note = 2'-O-methylguanosine-3'-phosphorothioate
  modified_base 22: mod_base = OTHER; note = 2'-O-methyladenosine-3'-phosphorothioate
  modified_base 23: mod_base = OTHER; note = 2'-O-methylguanosine
tcataatcagcaactgtccagag

SEQ ID NO: 1059 - RNA, 23 nt, synthetic construct
  source 1..23: mol_type = other RNA
  modified_base 1: mod_base = OTHER; note = 2'-O-methyluridine-3'-phosphorothioate 5'-(E)-Vinylphosphonate
  modified_base 2: mod_base = OTHER; note = 2'-deoxy-2'-fluorocytidine-3'-phosphorothioate
  modified_base 3: mod_base = OTHER; note = 2'-O-methylcytidine-3'-phosphate
  modified_base 4: mod_base = OTHER; note = 2'-O-methylguanosine-3'-phosphate
  modified_base 5: mod_base = OTHER; note = 2'-O-methyluridine-3'-phosphate
  modified_base 6: mod_base = OTHER; note = 2'-deoxy-2'-fluoroadenosine-3'-phosphate
  modified_base 7: mod_base = OTHER; note = 2'-O-methyladenosine-3'-phosphate
  modified_base 8: mod_base = OTHER; note = 2'-deoxy-2'-fluoroguanosine-3'-phosphate
  modified_base 9: mod_base = OTHER; note = 2'-deoxy-2'-fluoroguanosine-3'-phosphate
  modified_base 10: mod_base = OTHER; note = 2'-O-methyladenosine-3'-phosphate
  modified_base 11: mod_base = OTHER; note = 2'-O-methyladenosine-3'-phosphate
  modified_base 12: mod_base = OTHER; note = 2'-O-methyladenosine-3'-phosphate
  modified_base 13: mod_base = OTHER; note = 2'-O-methyladenosine-3'-phosphate
  modified_base 14: mod_base = OTHER; note = 2'-deoxy-2'-fluoroguanosine-3'-phosphate
  modified_base 15: mod_base = OTHER; note = 2'-O-methylguanosine-3'-phosphate
  modified_base 16: mod_base = OTHER; note = 2'-deoxy-2'-fluorocytidine-3'-phosphate
  modified_base 17: mod_base = OTHER; note = 2'-O-methylguanosine-3'-phosphate
  modified_base 18: mod_base = OTHER; note = 2'-O-methyladenosine-3'-phosphate
  modified_base 19: mod_base = OTHER; note = 2'-O-methylguanosine-3'-phosphate
  modified_base 20: mod_base = OTHER; note = 2'-O-methyladenosine-3'-phosphate
  modified_base 21: mod_base = OTHER; note = 2'-O-methylcytidine-3'-phosphorothioate
  modified_base 22: mod_base = OTHER; note = 2'-O-methyluridine-3'-phosphorothioate
  modified_base 23: mod_base = OTHER; note = 2'-O-methylcytidine
tccgtaaggaaaaggcgagactc

SEQ ID NO: 1060 - RNA, 23 nt, synthetic construct
  source 1..23: mol_type = other RNA
  modified_base 1: mod_base = OTHER; note = 2'-O-methyluridine-3'-phosphorothioate 5'-(E)-Vinylphosphonate
  modified_base 2: mod_base = OTHER; note = 2'-deoxy-2'-fluorouridine-3'-phosphorothioate
  modified_base 3: mod_base = OTHER; note = 2'-O-methylcytidine-3'-phosphate
  modified_base 4: mod_base = OTHER; note = 2'-O-methylcytidine-3'-phosphate
  modified_base 5: mod_base = OTHER; note = 2'-O-methylguanosine-3'-phosphate
  modified_base 6: mod_base = OTHER; note = 2'-deoxy-2'-fluorouridine-3'-phosphate
  modified_base 7: mod_base = OTHER; note = 2'-O-methyladenosine-3'-phosphate
  modified_base 8: mod_base = OTHER; note = 2'-deoxy-2'-fluoroadenosine-3'-phosphate
  modified_base 9: mod_base = OTHER; note = 2'-deoxy-2'-fluoroguanosine-3'-phosphate
  modified_base 10: mod_base = OTHER; note = 2'-O-methylguanosine-3'-phosphate
  modified_base 11: mod_base = OTHER; note = 2'-O-methyladenosine-3'-phosphate
  modified_base 12: mod_base = OTHER; note = 2'-O-methyladenosine-3'-phosphate
  modified_base 13: mod_base = OTHER; note = 2'-O-methyladenosine-3'-phosphate
  modified_base 14: mod_base = OTHER; note = 2'-deoxy-2'-fluoroadenosine-3'-phosphate
  modified_base 15: mod_base = OTHER; note = 2'-O-methylguanosine-3'-phosphate
  modified_base 16: mod_base = OTHER; note = 2'-deoxy-2'-fluoroguanosine-3'-phosphate
  modified_base 17: mod_base = OTHER; note = 2'-O-methylcytidine-3'-phosphate
  modified_base 18: mod_base = OTHER; note = 2'-O-methylguanosine-3'-phosphate
  modified_base 19: mod_base = OTHER; note = 2'-O-methyladenosine-3'-phosphate
  modified_base 20: mod_base = OTHER; note = 2'-O-methylguanosine-3'-phosphate
  modified_base 21: mod_base = OTHER; note = 2'-O-methyladenosine-3'-phosphorothioate
  modified_base 22: mod_base = OTHER; note = 2'-O-methylcytidine-3'-phosphorothioate
  modified_base 23: mod_base = OTHER; note = 2'-O-methyluridine
ttccgtaaggaaaaggcgagact

SEQ ID NO: 1061 - RNA, 23 nt, synthetic construct
  source 1..23: mol_type = other RNA
  modified_base 1: mod_base = OTHER; note = 2'-O-methyluridine-3'-phosphorothioate 5'-(E)-Vinylphosphonate
  modified_base 2: mod_base = OTHER; note = 2'-deoxy-2'-fluoroadenosine-3'-phosphorothioate
  modified_base 3: mod_base = OTHER; note = 2'-O-methyladenosine-3'-phosphate
  modified_base 4: mod_base = OTHER; note = 2'-O-methyluridine-3'-phosphate
  modified_base 5: mod_base = OTHER; note = 2'-O-methylcytidine-3'-phosphate
  modified_base 6: mod_base = OTHER; note = 2'-deoxy-2'-fluorocytidine-3'-phosphate
  modified_base 7: mod_base = OTHER; note = 2'-O-methylguanosine-3'-phosphate
  modified_base 8: mod_base = OTHER; note = 2'-deoxy-2'-fluorouridine-3'-phosphate
  modified_base 9: mod_base = OTHER; note = 2'-deoxy-2'-fluoroadenosine-3'-phosphate
  modified_base 10: mod_base = OTHER; note = 2'-O-methyladenosine-3'-phosphate
  modified_base 11: mod_base = OTHER; note = 2'-O-methylguanosine-3'-phosphate
  modified_base 12: mod_base = OTHER; note = 2'-O-methylguanosine-3'-phosphate
  modified_base 13: mod_base = OTHER; note = 2'-O-methyladenosine-3'-phosphate
  modified_base 14: mod_base = OTHER; note = 2'-deoxy-2'-fluoroadenosine-3'-phosphate
  modified_base 15: mod_base = OTHER; note = 2'-O-methyladenosine-3'-phosphate
  modified_base 16: mod_base = OTHER; note = 2'-deoxy-2'-fluoroadenosine-3'-phosphate
  modified_base 17: mod_base = OTHER; note = 2'-O-methylguanosine-3'-phosphate
  modified_base 18: mod_base = OTHER; note = 2'-O-methylguanosine-3'-phosphate
  modified_base 19: mod_base = OTHER; note = 2'-O-methylcytidine-3'-phosphate
  modified_base 20: mod_base = OTHER; note = 2'-O-methylguanosine-3'-phosphate
  modified_base 21: mod_base = OTHER; note = 2'-O-methyladenosine-3'-phosphorothioate
  modified_base 22: mod_base = OTHER; note = 2'-O-methylguanosine-3'-phosphorothioate
  modified_base 23: mod_base = OTHER; note = 2'-O-methyladenosine
taatccgtaaggaaaaggcgaga

SEQ ID NO: 1062 - RNA, 23 nt, synthetic construct
  source 1..23: mol_type = other RNA
  modified_base 1: mod_base = OTHER; note = 2'-O-methyluridine-3'-phosphorothioate 5'-(E)-Vinylphosphonate
  modified_base 2: mod_base = OTHER; note = 2'-deoxy-2'-fluoroadenosine-3'-phosphorothioate
  modified_base 3: mod_base = OTHER; note = 2'-O-methyladenosine-3'-phosphate
  modified_base 4: mod_base = OTHER; note = 2'-O-methyladenosine-3'-phosphate
  modified_base 5: mod_base = OTHER; note = 2'-O-methyluridine-3'-phosphate
  modified_base 6: mod_base = OTHER; note = 2'-deoxy-2'-fluorocytidine-3'-phosphate
  modified_base 7: mod_base = OTHER; note = 2'-O-methylcytidine-3'-phosphate
  modified_base 8: mod_base = OTHER; note = 2'-deoxy-2'-fluoroguanosine-3'-phosphate
  modified_base 9: mod_base = OTHER; note = 2'-deoxy-2'-fluorouridine-3'-phosphate
  modified_base 10: mod_base = OTHER; note = 2'-O-methyladenosine-3'-phosphate
  modified_base 11: mod_base = OTHER; note = 2'-O-methyladenosine-3'-phosphate
  modified_base 12: mod_base = OTHER; note = 2'-O-methylguanosine-3'-phosphate
  modified_base 13: mod_base = OTHER; note = 2'-O-methylguanosine-3'-phosphate
  modified_base 14: mod_base = OTHER; note = 2'-deoxy-2'-fluoroadenosine-3'-phosphate
  modified_base 15: mod_base = OTHER; note = 2'-O-methyladenosine-3'-phosphate
  modified_base 16: mod_base = OTHER; note = 2'-deoxy-2'-fluoroadenosine-3'-phosphate
  modified_base 17: mod_base = OTHER; note = 2'-O-methyladenosine-3'-phosphate
  modified_base 18: mod_base = OTHER; note = 2'-O-methylguanosine-3'-phosphate
  modified_base 19: mod_base = OTHER; note = 2'-O-methylguanosine-3'-phosphate
  modified_base 20: mod_base = OTHER; note = 2'-O-methylcytidine-3'-phosphate
  modified_base 21: mod_base = OTHER; note = 2'-O-methylguanosine-3'-phosphorothioate
  modified_base 22: mod_base = OTHER; note = 2'-O-methyladenosine-3'-phosphorothioate
  modified_base 23: mod_base = OTHER; note = 2'-O-methylguanosine
taaatccgtaaggaaaaggcgag

SEQ ID NO: 1063 - RNA, 23 nt, synthetic construct
  source 1..23: mol_type = other RNA
  modified_base 1: mod_base = OTHER; note = 2'-O-methyluridine-3'-phosphorothioate 5'-(E)-Vinylphosphonate
  modified_base 2: mod_base = OTHER; note = 2'-deoxy-2'-fluoroadenosine-3'-phosphorothioate
  modified_base 3: mod_base = OTHER; note = 2'-O-methyladenosine-3'-phosphate
  modified_base 4: mod_base = OTHER; note = 2'-O-methyladenosine-3'-phosphate
  modified_base 5: mod_base = OTHER; note = 2'-O-methyladenosine-3'-phosphate
  modified_base 6: mod_base = OTHER; note = 2'-deoxy-2'-fluorouridine-3'-phosphate
  modified_base 7: mod_base = OTHER; note = 2'-O-methylcytidine-3'-phosphate
  modified_base 8: mod_base = OTHER; note = 2'-deoxy-2'-fluorocytidine-3'-phosphate
  modified_base 9: mod_base = OTHER; note = 2'-deoxy-2'-fluoroguanosine-3'-phosphate
  modified_base 10: mod_base = OTHER; note = 2'-O-methyluridine-3'-phosphate
  modified_base 11: mod_base = OTHER; note = 2'-O-methyladenosine-3'-phosphate
  modified_base 12: mod_base = OTHER; note = 2'-O-methyladenosine-3'-phosphate
  modified_base 13: mod_base = OTHER; note = 2'-O-methylguanosine-3'-phosphate
  modified_base 14: mod_base = OTHER; note = 2'-deoxy-2'-fluoroguanosine-3'-phosphate
  modified_base 15: mod_base = OTHER; note = 2'-O-methyladenosine-3'-phosphate
  modified_base 16: mod_base = OTHER; note = 2'-deoxy-2'-fluoroadenosine-3'-phosphate
  modified_base 17: mod_base = OTHER; note = 2'-O-methyladenosine-3'-phosphate
  modified_base 18: mod_base = OTHER; note = 2'-O-methyladenosine-3'-phosphate
  modified_base 19: mod_base = OTHER; note = 2'-O-methylguanosine-3'-phosphate
  modified_base 20: mod_base = OTHER; note = 2'-O-methylguanosine-3'-phosphate
  modified_base 21: mod_base = OTHER; note = 2'-O-methylcytidine-3'-phosphorothioate
  modified_base 22: mod_base = OTHER; note = 2'-O-methylguanosine-3'-phosphorothioate
  modified_base 23: mod_base = OTHER; note = 2'-O-methyladenosine
taaaatccgtaaggaaaaggcga

SEQ ID NO: 1064 - RNA, 23 nt, synthetic construct
  source 1..23: mol_type = other RNA
  modified_base 1: mod_base = OTHER; note = 2'-O-methyluridine-3'-phosphorothioate 5'-(E)-Vinylphosphonate
  modified_base 2: mod_base = OTHER; note = 2'-deoxy-2'-fluoroguanosine-3'-phosphorothioate
  modified_base 3: mod_base = OTHER; note = 2'-O-methyladenosine-3'-phosphate
  modified_base 4: mod_base = OTHER; note = 2'-O-methyluridine-3'-phosphate
  modified_base 5: mod_base = OTHER; note = 2'-O-methyladenosine-3'-phosphate
  modified_base 6: mod_base = OTHER; note = 2'-deoxy-2'-fluoroguanosine-3'-phosphate
  modified_base 7: mod_base = OTHER; note = 2'-O-methylcytidine-3'-phosphate
  modified_base 8: mod_base = OTHER; note = 2'-deoxy-2'-fluorouridine-3'-phosphate
  modified_base 9: mod_base = OTHER; note = 2'-deoxy-2'-fluorocytidine-3'-phosphate
  modified_base 10: mod_base = OTHER; note = 2'-O-methylcytidine-3'-phosphate
  modified_base 11: mod_base = OTHER; note = 2'-O-methyladenosine-3'-phosphate
  modified_base 12: mod_base = OTHER; note = 2'-O-methyladenosine-3'-phosphate
  modified_base 13: mod_base = OTHER; note = 2'-O-methyladenosine-3'-phosphate
  modified_base 14: mod_base = OTHER; note = 2'-deoxy-2'-fluorouridine-3'-phosphate
  modified_base 15: mod_base = OTHER; note = 2'-O-methyluridine-3'-phosphate
  modified_base 16: mod_base = OTHER; note = 2'-deoxy-2'-fluoroadenosine-3'-phosphate
  modified_base 17: mod_base = OTHER; note = 2'-O-methyluridine-3'-phosphate
  modified_base 18: mod_base = OTHER; note = 2'-O-methylguanosine-3'-phosphate
  modified_base 19: mod_base = OTHER; note = 2'-O-methylguanosine-3'-phosphate
  modified_base 20: mod_base = OTHER; note = 2'-O-methyluridine-3'-phosphate
  modified_base 21: mod_base = OTHER; note = 2'-O-methyluridine-3'-phosphorothioate
  modified_base 22: mod_base = OTHER; note = 2'-O-methylcytidine-3'-phosphorothioate
  modified_base 23: mod_base = OTHER; note = 2'-O-methylcytidine
tgatagctccaaattatggttcc

SEQ ID NO: 1065 - RNA, 23 nt, synthetic construct
  source 1..23: mol_type = other RNA
  modified_base 1: mod_base = OTHER; note = 2'-O-methyluridine-3'-phosphorothioate 5'-(E)-Vinylphosphonate
  modified_base 2: mod_base = OTHER; note = 2'-deoxy-2'-fluoroguanosine-3'-phosphorothioate
  modified_base 3: mod_base = OTHER; note = 2'-O-methylcytidine-3'-phosphate
  modified_base 4: mod_base = OTHER; note = 2'-O-methyladenosine-3'-phosphate
  modified_base 5: mod_base = OTHER; note = 2'-O-methyluridine-3'-phosphate
  modified_base 6: mod_base = OTHER; note = 2'-deoxy-2'-fluorouridine-3'-phosphate
  modified_base 7: mod_base = OTHER; note = 2'-O-methylguanosine-3'-phosphate
  modified_base 8: mod_base = OTHER; note = 2'-deoxy-2'-fluoroadenosine-3'-phosphate
  modified_base 9: mod_base = OTHER; note = 2'-deoxy-2'-fluorocytidine-3'-phosphate
  modified_base 10: mod_base = OTHER; note = 2'-O-methyladenosine-3'-phosphate
  modified_base 11: mod_base = OTHER; note = 2'-O-methylguanosine-3'-phosphate
  modified_base 12: mod_base = OTHER; note = 2'-O-methylguanosine-3'-phosphate
  modified_base 13: mod_base = OTHER; note = 2'-O-methyluridine-3'-phosphate
  modified_base 14: mod_base = OTHER; note = 2'-deoxy-2'-fluoroadenosine-3'-phosphate
  modified_base 15: mod_base = OTHER; note = 2'-O-methyladenosine-3'-phosphate
  modified_base 16: mod_base = OTHER; note = 2'-deoxy-2'-fluoroadenosine-3'-phosphate
  modified_base 17: mod_base = OTHER; note = 2'-O-methylcytidine-3'-phosphate
  modified_base 18: mod_base = OTHER; note = 2'-O-methyluridine-3'-phosphate
  modified_base 19: mod_base = OTHER; note = 2'-O-methylguanosine-3'-phosphate
  modified_base 20: mod_base = OTHER; note = 2'-O-methylcytidine-3'-phosphate
  modified_base 21: mod_base = OTHER; note = 2'-O-methyluridine-3'-phosphorothioate
  modified_base 22: mod_base = OTHER; note = 2'-O-methylguanosine-3'-phosphorothioate
  modified_base 23: mod_base = OTHER; note = 2'-O-methylguanosine
tgcattgacaggtaaactgctgg

SEQ ID NO: 1066 - RNA, 23 nt, synthetic construct
  source 1..23: mol_type = other RNA
  modified_base 1: mod_base = OTHER; note = 2'-O-methyluridine-3'-phosphorothioate 5'-(E)-Vinylphosphonate
  modified_base 2: mod_base = OTHER; note = 2'-deoxy-2'-fluoroadenosine-3'-phosphorothioate
  modified_base 3: mod_base = OTHER; note = 2'-O-methylguanosine-3'-phosphate
  modified_base 4: mod_base = OTHER; note = 2'-O-methylguanosine-3'-phosphate
  modified_base 5: mod_base = OTHER; note = 2'-O-methylcytidine-3'-phosphate
  modified_base 6: mod_base = OTHER; note = 2'-deoxy-2'-fluoroadenosine-3'-phosphate
  modified_base 7: mod_base = OTHER; note = 2'-O-methyluridine-3'-phosphate
  modified_base 8: mod_base = OTHER; note = 2'-deoxy-2'-fluorouridine-3'-phosphate
  modified_base 9: mod_base = OTHER; note = 2'-deoxy-2'-fluoroguanosine-3'-phosphate
  modified_base 10: mod_base = OTHER; note = 2'-O-methyladenosine-3'-phosphate
  modified_base 11: mod_base = OTHER; note = 2'-O-methylcytidine-3'-phosphate
  modified_base 12: mod_base = OTHER; note = 2'-O-methyladenosine-3'-phosphate
  modified_base 13: mod_base = OTHER; note = 2'-O-methylguanosine-3'-phosphate
  modified_base 14: mod_base = OTHER; note = 2'-deoxy-2'-fluoroguanosine-3'-phosphate
  modified_base 15: mod_base = OTHER; note = 2'-O-methyluridine-3'-phosphate
  modified_base 16: mod_base = OTHER; note = 2'-deoxy-2'-fluoroadenosine-3'-phosphate
  modified_base 17: mod_base = OTHER; note = 2'-O-methyladenosine-3'-phosphate
  modified_base 18: mod_base = OTHER; note = 2'-O-methyladenosine-3'-phosphate
  modified_base 19: mod_base = OTHER; note = 2'-O-methylcytidine-3'-phosphate
  modified_base 20: mod_base = OTHER; note = 2'-O-methyluridine-3'-phosphate
  modified_base 21: mod_base = OTHER; note = 2'-O-methylguanosine-3'-phosphorothioate
  modified_base 22: mod_base = OTHER; note = 2'-O-methylcytidine-3'-phosphorothioate
  modified_base 23: mod_base = OTHER; note = 2'-O-methyluridine
taggcattgacaggtaaactgct

SEQ ID NO: 1067 - RNA, 23 nt, synthetic construct
  source 1..23: mol_type = other RNA
  modified_base 1: mod_base = OTHER; note = 2'-O-methyluridine-3'-phosphorothioate 5'-(E)-Vinylphosphonate
  modified_base 2: mod_base = OTHER; note = 2'-deoxy-2'-fluorocytidine-3'-phosphorothioate
  modified_base 3: mod_base = OTHER; note = 2'-O-methyladenosine-3'-phosphate
  modified_base 4: mod_base = OTHER; note = 2'-O-methyladenosine-3'-phosphate
  modified_base 5: mod_base = OTHER; note = 2'-O-methyluridine-3'-phosphate
  modified_base 6: mod_base = OTHER; note = 2'-deoxy-2'-fluoroguanosine-3'-phosphate
  modified_base 7: mod_base = OTHER; note = 2'-O-methyluridine-3'-phosphate
  modified_base 8: mod_base = OTHER; note = 2'-deoxy-2'-fluoroguanosine-3'-phosphate
  modified_base 9: mod_base = OTHER; note = 2'-deoxy-2'-fluoroadenosine-3'-phosphate
  modified_base 10: mod_base = OTHER; note = 2'-O-methyladenosine-3'-phosphate
  modified_base 11: mod_base = OTHER; note = 2'-O-methyluridine-3'-phosphate
  modified_base 12: mod_base = OTHER; note = 2'-O-methylguanosine-3'-phosphate
  modified_base 13: mod_base = OTHER; note = 2'-O-methyladenosine-3'-phosphate
  modified_base 14: mod_base = OTHER; note = 2'-deoxy-2'-fluorocytidine-3'-phosphate
  modified_base 15: mod_base = OTHER; note = 2'-O-methyladenosine-3'-phosphate
  modified_base 16: mod_base = OTHER; note = 2'-deoxy-2'-fluorouridine-3'-phosphate
  modified_base 17: mod_base = OTHER; note = 2'-O-methyluridine-3'-phosphate
  modified_base 18: mod_base = OTHER; note = 2'-O-methyladenosine-3'-phosphate
  modified_base 19: mod_base = OTHER; note = 2'-O-methylguanosine-3'-phosphate
  modified_base 20: mod_base = OTHER; note = 2'-O-methyladenosine-3'-phosphate
  modified_base 21: mod_base = OTHER; note = 2'-O-methylguanosine-3'-phosphorothioate
  modified_base 22: mod_base = OTHER; note = 2'-O-methyladenosine-3'-phosphorothioate
  modified_base 23: mod_base = OTHER; note = 2'-O-methylguanosine
tcaatgtgaatgacattagagag

SEQ ID NO: 1068 - RNA, 23 nt, synthetic construct
  source 1..23: mol_type = other RNA
ccaccgggtatgaagctaaaata

SEQ ID NO: 1069 - RNA, 23 nt, synthetic construct
  source 1..23: mol_type = other RNA
cctctcctgtattgaaagcgttt

SEQ ID NO: 1070 - RNA, 23 nt, synthetic construct
  source 1..23: mol_type = other RNA
tgctgctgattggtttcagtctt

SEQ ID NO: 1071 - RNA, 23 nt, synthetic construct
  source 1..23: mol_type = other RNA
ggcctccagaaacaactcgaacg

SEQ ID NO: 1072 - RNA, 23 nt, synthetic construct
  source 1..23: mol_type = other RNA
gaaagtgcatactcacaactggg

SEQ ID NO: 1073 - RNA, 23 nt, synthetic construct
  source 1..23: mol_type = other RNA
atcttggaatctagtcgctttcg

SEQ ID NO: 1074 - RNA, 23 nt, synthetic construct
  source 1..23: mol_type = other RNA
tcttggaatctagtcgctttcgt

SEQ ID NO: 1075 - RNA, 23 nt, synthetic construct
  source 1..23: mol_type = other RNA
cttggaatctagtcgctttcgtt

SEQ ID NO: 1076 - RNA, 23 nt, synthetic construct
  source 1..23: mol_type = other RNA
ttggaatctagtcgctttcgtta

SEQ ID NO: 1077 - RNA, 23 nt, synthetic construct
  source 1..23: mol_type = other RNA
tggaatctagtcgctttcgttat

SEQ ID NO: 1078 - RNA, 23 nt, synthetic construct
  source 1..23: mol_type = other RNA
ttgaccgctacatcttagtagat

SEQ ID NO: 1079 - RNA, 23 nt, synthetic construct
  source 1..23: mol_type = other RNA
gtgggcaaagaaggtactcgcat

SEQ ID NO: 1080 - RNA, 23 nt, synthetic construct
  source 1..23: mol_type = other RNA
gcaaagaaggtactcgcatgaag

SEQ ID NO: 1081 - RNA, 23 nt, synthetic construct
  source 1..23: mol_type = other RNA
tctcgggcaagttctatcatacc

SEQ ID NO: 1082 - RNA, 23 nt, synthetic construct
  source 1..23: mol_type = other RNA
agatgaggctcaacaaacagttt

SEQ ID NO: 1083 - RNA, 23 nt, synthetic construct
  source 1..23: mol_type = other RNA
cacccacacgatcttctataatg

SEQ ID NO: 1084 - RNA, 23 nt, synthetic construct
  source 1..23: mol_type = other RNA
acccacacgatcttctataatga

SEQ ID NO: 1085 - RNA, 23 nt, synthetic construct
  source 1..23: mol_type = other RNA
cacacgatcttctataatgagta

SEQ ID NO: 1086 - RNA, 23 nt, synthetic construct
  source 1..23: mol_type = other RNA
tctcgtgaactagatcgaagcat

SEQ ID NO: 1087 - RNA, 23 nt, synthetic construct
  source 1..23: mol_type = other RNA
agtgctgcttaatccgatcagtg

SEQ ID NO: 1088 - RNA, 23 nt, synthetic construct
  source 1..23: mol_type = other RNA
taatccgatcagtgtctttatga

SEQ ID NO: 1089 - RNA, 23 nt, synthetic construct
  source 1..23: mol_type = other RNA
aatccgatcagtgtctttatgac

SEQ ID NO: 1090 - RNA, 23 nt, synthetic construct
  source 1..23: mol_type = other RNA
ttgaactttttcctcaggaacga

SEQ ID NO: 1091 - RNA, 23 nt, synthetic construct
  source 1..23: mol_type = other RNA
tgaactttttcctcaggaacgaa

SEQ ID NO: 1092 - RNA, 23 nt, synthetic construct
  source 1..23: mol_type = other RNA
aggagattcagttcttcaatggc

SEQ ID NO: 1093 - RNA, 23 nt, synthetic construct
  source 1..23: mol_type = other RNA
cccattgctctgaactacacctt

SEQ ID NO: 1094 - RNA, 23 nt, synthetic construct
  source 1..23: mol_type = other RNA
ccattgctctgaactacaccttc

SEQ ID NO: 1095 - RNA, 23 nt, synthetic construct
  source 1..23: mol_type = other RNA
ctctgaactacaccttctaccaa

SEQ ID NO: 1096 - RNA, 23 nt, synthetic construct
  source 1..23: mol_type = other RNA
tctgctacttcgctccttgcaga

SEQ ID NO: 1097 - RNA, 23 nt, synthetic construct
  source 1..23: mol_type = other RNA
cttgcagaaccgttgtcttgttc

SEQ ID NO: 1098 - RNA, 23 nt, synthetic construct
  source 1..23: mol_type = other RNA
tcttgttcctggctactattcta

SEQ ID NO: 1099 - RNA, 23 nt, synthetic construct
  source 1..23: mol_type = other RNA
ttgttcctggctactattctacc

SEQ ID NO: 1100 - RNA, 23 nt, synthetic construct
  source 1..23: mol_type = other RNA
ccctctggacagttgctgattat

SEQ ID NO: 1101 - RNA, 23 nt, synthetic construct
  source 1..23: mol_type = other RNA
cctctggacagttgctgattatg

SEQ ID NO: 1102 - RNA, 23 nt, synthetic construct
  source 1..23: mol_type = other RNA
ctctggacagttgctgattatgg

SEQ ID NO: 1103 - RNA, 23 nt, synthetic construct
  source 1..23: mol_type = other RNA
gagtctcgccttttccttacgga

SEQ ID NO: 1104 - RNA, 23 nt, synthetic construct
  source 1..23: mol_type = other RNA
agtctcgccttttccttacggat

SEQ ID NO: 1105 - RNA, 23 nt, synthetic construct
  source 1..23: mol_type = other RNA
tctcgccttttccttacggattt

SEQ ID NO: 1106 - RNA, 23 nt, synthetic construct
  source 1..23: mol_type = other RNA
ctcgccttttccttacggatttt

SEQ ID NO: 1107 - RNA, 23 nt, synthetic construct
  source 1..23: mol_type = other RNA
tcgccttttccttacggattttt

SEQ ID NO: 1108 - RNA, 23 nt, synthetic construct
  source 1..23: mol_type = other RNA
ggaaccataatttggagctatca

SEQ ID NO: 1109 - RNA, 23 nt, synthetic construct
  source 1..23: mol_type = other RNA
ccagcagtttacctgtcaatgcc

SEQ ID NO: 1110 - RNA, 23 nt, synthetic construct
  source 1..23: mol_type = other RNA
agcagtttacctgtcaatgccta

SEQ ID NO: 1111 - RNA, 23 nt, synthetic construct
  source 1..23: mol_type = other RNA
ctctctaatgtcattcacattga

SEQ ID NO: 1112 - RNA, 23 nt, synthetic construct
  source 1..23: mol_type = other RNA
gtcagtcaagtccaacatccggg

SEQ ID NO: 1113 - RNA, 23 nt, synthetic construct
  source 1..23: mol_type = other RNA
ccaagcaccgaatctactacgtc

SEQ ID NO: 1114 - RNA, 23 nt, synthetic construct
  source 1..23: mol_type = other RNA
tgcatacgtgtttcgatgtctac

SEQ ID NO: 1115 - RNA, 23 nt, synthetic construct
  source 1..23: mol_type = other RNA
gcatacgtgtttcgatgtctacc

SEQ ID NO: 1116 - RNA, 23 nt, synthetic construct
  source 1..23: mol_type = other RNA
catacgtgtttcgatgtctaccg

SEQ ID NO: 1117 - RNA, 23 nt, synthetic construct
  source 1..23: mol_type = other RNA
acgtgtttcgatgtctaccgctg

SEQ ID NO: 1118 - RNA, 23 nt, synthetic construct
  source 1..23: mol_type = other RNA
cgtgtttcgatgtctaccgctgc

SEQ ID NO: 1119 - RNA, 23 nt, synthetic construct
  source 1..23: mol_type = other RNA
aacaaaatcaaggtgtacatcta

SEQ ID NO: 1120 - RNA, 23 nt, synthetic construct
  source 1..23: mol_type = other RNA
tcccgggagtacaatgaactgct

SEQ ID NO: 1121 - RNA, 23 nt, synthetic construct
  source 1..23: mol_type = other RNA
cccgggagtacaatgaactgctg

SEQ ID NO: 1122 - RNA, 23 nt, synthetic construct
  source 1..23: mol_type = other RNA
gaacaaatcacctgctgttcaat

SEQ ID NO: 1123 - RNA, 23 nt, synthetic construct
  source 1..23: mol_type = other RNA
ttctacctggacttaccggcagg

SEQ ID NO: 1124 - RNA, 23 nt, synthetic construct
  source 1..23: mol_type = other RNA
gctacgatgtcagcattcctgtt

SEQ ID NO: 1125 - RNA, 23 nt, synthetic construct
  source 1..23: mol_type = other RNA
tgtcagcattcctgttttcagcc

SEQ ID NO: 1126 - RNA, 23 nt, synthetic construct
  source 1..23: mol_type = other RNA
ctactgtcctctcagatggccat

SEQ ID NO: 1127 - RNA, 23 nt, synthetic construct
  source 1..23: mol_type = other RNA
caccctgagtacagagaggaact

SEQ ID NO: 1128 - RNA, 23 nt, synthetic construct
  source 1..23: mol_type = other RNA
gtacagagaggaactagaagccc

SEQ ID NO: 1129 - RNA, 23 nt, synthetic construct
  source 1..23: mol_type = other RNA
gtgttagtcttggacaaatgcac

SEQ ID NO: 1130 - RNA, 23 nt, synthetic construct
  source 1..23: mol_type = other RNA
cttggacaaatgcaccaatctct

SEQ ID NO: 1131 - RNA, 23 nt, synthetic construct
  source 1..23: mol_type = other RNA
ttggacaaatgcaccaatctctc

SEQ ID NO: 1132 - RNA, 23 nt, synthetic construct
  source 1..23: mol_type = other RNA
gctgcaggaggctactttttgta

SEQ ID NO: 1133 - RNA, 23 nt, synthetic construct
  source 1..23: mol_type = other RNA
ctgcaggaggctactttttgtac

SEQ ID NO: 1134 - RNA, 23 nt, synthetic construct
  source 1..23: mol_type = other RNA
tgcaggaggctactttttgtacg

SEQ ID NO: 1135 - RNA, 23 nt, synthetic construct
  source 1..23: mol_type = other RNA
gcaggaggctactttttgtacgg

SEQ ID NO: 1136 - RNA, 23 nt, synthetic construct
  source 1..23: mol_type = other RNA
caggaggctactttttgtacggt

SEQ ID NO: 1137 - RNA, 23 nt, synthetic construct
  source 1..23: mol_type = other RNA
aggaggctactttttgtacggtc

SEQ ID NO: 1138 - RNA, 23 nt, synthetic construct
  source 1..23: mol_type = other RNA
gctgtgtcccagttgtcattgca

SEQ ID NO: 1139 - RNA, 23 nt, synthetic construct
  source 1..23: mol_type = other RNA
gtcccagttgtcattgcagactc

SEQ ID NO: 1140 - RNA, 23 nt, synthetic construct
  source 1..23: mol_type = other RNA
tcccagttgtcattgcagactct

SEQ ID NO: 1141 - RNA, 23 nt, synthetic construct
  source 1..23: mol_type = other RNA
cagttgtcattgcagactcttat

SEQ ID NO: 1142 - RNA, 23 nt, synthetic construct
  source 1..23: mol_type = other RNA
gactcttatattctgcctttctc

SEQ ID NO: 1143 - RNA, 23 nt, synthetic construct
  source 1..23: mol_type = other RNA
gttctggactggaagagggcatc

SEQ ID NO: 1144 - RNA, 23 nt, synthetic construct
  source 1..23: mol_type = other RNA
aagatgtcagatgtgtacagcat

SEQ ID NO: 1145 - RNA, 23 nt, synthetic construct
  source 1..23: mol_type = other RNA
ccaccctacagatcatcaatgac

SEQ ID NO: 1146 - RNA, 23 nt, synthetic construct
  source 1..23: mol_type = other RNA
acagatcatcaatgacaggatct

SEQ ID NO: 1147 - RNA, 23 nt, synthetic construct
  source 1..23: mol_type = other RNA
catcaatgacaggatctatccat

SEQ ID NO: 1148 - RNA, 23 nt, synthetic construct
  source 1..23: mol_type = other RNA
atcaatgacaggatctatccata

SEQ ID NO: 1149 - RNA, 23 nt, synthetic construct
  source 1..23: mol_type = other RNA
tcaatgacaggatctatccatat

SEQ ID NO: 1150 - RNA, 23 nt, synthetic construct
  source 1..23: mol_type = other RNA
caatgacaggatctatccatatg

SEQ ID NO: 1151 - RNA, 23 nt, synthetic construct
  source 1..23: mol_type = other RNA
atgacaggatctatccatatgca

SEQ ID NO: 1152 - RNA, 23 nt, synthetic construct
  source 1..23: mol_type = other RNA
tgacaggatctatccatatgcag

SEQ ID NO: 1153 - RNA, 23 nt, synthetic construct
  source 1..23: mol_type = other RNA
catctcctatgaagagtggaatg

SEQ ID NO: 1154 - RNA, 23 nt, synthetic construct
  source 1..23: mol_type = other RNA
atctcctatgaagagtggaatga

SEQ ID NO: 1155 - RNA, 23 nt, synthetic construct
  source 1..23: mol_type = other RNA
ctcctatgaagagtggaatgacc

SEQ ID NO: 1156 - RNA, 23 nt, synthetic construct
  source 1..23: mol_type = other RNA
gaagagtggaatgaccctcctgc

SEQ ID NO: 1157 - RNA, 23 nt, synthetic construct
  source 1..23: mol_type = other RNA
aagagtggaatgaccctcctgct

SEQ ID NO: 1158 - RNA, 23 nt, synthetic construct
  source 1..23: mol_type = other RNA
atgaccctcctgctgtgaagtgg

SEQ ID NO: 1159 - RNA, 23 nt, synthetic construct
  source 1..23: mol_type = other RNA
tcctgctgtgaagtgggctagtg

SEQ ID NO: 1160 - RNA, 23 nt, synthetic construct
  source 1..23: mol_type = other RNA
aagtgggctagtgtgagcaaccc

SEQ ID NO: 1161 - RNA, 23 nt, synthetic construct
  source 1..23: mol_type = other RNA
ctggtggtctggaataatcagaa

SEQ ID NO: 1162 - RNA, 23 nt, synthetic construct
  source 1..23: mol_type = other RNA
ggtggtctggaataatcagaata

SEQ ID NO: 1163 - RNA, 23 nt, synthetic construct
  source 1..23: mol_type = other RNA
gtggtctggaataatcagaataa

SEQ ID NO: 1164 - RNA, 23 nt, synthetic construct
  source 1..23: mol_type = other RNA
ggaataatcagaataaaaaccct

SEQ ID NO: 1165 - RNA, 23 nt, synthetic construct
  source 1..23: mol_type = other RNA
gaataatcagaataaaaaccctc

SEQ ID NO: 1166 - RNA, 23 nt, synthetic construct
  source 1..23: mol_type = other RNA
aataatcagaataaaaaccctcc

SEQ ID NO: 1167 - RNA, 23 nt, synthetic construct
  source 1..23: mol_type = other RNA
ataatcagaataaaaaccctccg

SEQ ID NO: 1168 - RNA, 23 nt, synthetic construct
  source 1..23: mol_type = other RNA
gactgcagaaaacaagctaagta

SEQ ID NO: 1169 - RNA, 23 nt, synthetic construct
  source 1..23: mol_type = other RNA
gcagaaaacaagctaagtaatcg

SEQ ID NO: 1170 - RNA, 23 nt, synthetic construct
  source 1..23: mol_type = other RNA
gaaaacaagctaagtaatcgttt

SEQ ID NO: 1171 - RNA, 23 nt, synthetic construct
  source 1..23: mol_type = other RNA
aaaacaagctaagtaatcgtttc

SEQ ID NO: 1172 - RNA, 23 nt, synthetic construct
  source 1..23: mol_type = other RNA
aaacaagctaagtaatcgtttct

SEQ ID NO: 1173 - RNA, 23 nt, synthetic construct
  source 1..23: mol_type = other RNA
aacaagctaagtaatcgtttctt

SEQ ID NO: 1174 - RNA, 23 nt, synthetic construct
  source 1..23: mol_type = other RNA
acaagctaagtaatcgtttcttc

SEQ ID NO: 1175 - RNA, 23 nt, synthetic construct
  source 1..23: mol_type = other RNA
caagctaagtaatcgtttcttcc

SEQ ID NO: 1176 - RNA, 23 nt, synthetic construct
  source 1..23: mol_type = other RNA
aagctaagtaatcgtttcttccc

SEQ ID NO: 1177 - RNA, 23 nt, synthetic construct
  source 1..23: mol_type = other RNA
agctaagtaatcgtttcttccct

SEQ ID NO: 1178 - RNA, 23 nt, synthetic construct
  source 1..23: mol_type = other RNA
agtaatcgtttcttcccttacga

SEQ ID NO: 1179 - RNA, 23 nt, synthetic construct
  source 1..23: mol_type = other RNA
gtaatcgtttcttcccttacgac

SEQ ID NO: 1180 - RNA, 23 nt, synthetic construct
  source 1..23: mol_type = other RNA
tcccttacgacgaaatcgagaca

SEQ ID NO: 1181 - RNA, 23 nt, synthetic construct
  source 1..23: mol_type = other RNA
tgacgagctgcagtttggttatg

SEQ ID NO: 1182 - RNA, 23 nt, synthetic construct
  source 1..23: mol_type = other RNA
acgagctgcagtttggttatgag

SEQ ID NO: 1183 - RNA, 23 nt, synthetic construct
  source 1..23: mol_type = other RNA
gatactcacatgaactgtgaaga

SEQ ID NO: 1184 - RNA, 23 nt, synthetic construct
  source 1..23: mol_type = other RNA
cacatgaactgtgaagatattgc

SEQ ID NO: 1185 - RNA, 23 nt, synthetic construct
  source 1..23: mol_type = other RNA
acatgaactgtgaagatattgcc

SEQ ID NO: 1186 - RNA, 23 nt, synthetic construct
  source 1..23: mol_type = other RNA
catgaactgtgaagatattgcca

SEQ ID NO: 1187 - RNA, 23 nt, synthetic construct
  source 1..23: mol_type = other RNA
aactgtgaagatattgccatgaa

SEQ ID NO: 1188 - RNA, 23 nt, synthetic construct
  source 1..23: mol_type = other RNA
ctgtgaagatattgccatgaatt

SEQ ID NO: 1189 - RNA, 23 nt, synthetic construct
  source 1..23: mol_type = other RNA
agggaaagctgtcatcaaggtaa

SEQ ID NO: 1190 - RNA, 23 nt, synthetic construct
  source 1..23: mol_type = other RNA
gggaaagctgtcatcaaggtaac

SEQ ID NO: 1191 - RNA, 23 nt, synthetic construct
  source 1..23: mol_type = other RNA
ggaaagctgtcatcaaggtaacc

SEQ ID NO: 1192 - RNA, 23 nt, synthetic construct
  source 1..23: mol_type = other RNA
gaaagctgtcatcaaggtaaccc

SEQ ID NO: 1193 - RNA, 23 nt, synthetic construct
  source 1..23: mol_type = other RNA
agttcaagtgtcctgagtgcacg

SEQ ID NO: 1194 - RNA, 23 nt, synthetic construct
  source 1..23: mol_type = other RNA
ccctagaccagactcacatggta

SEQ ID NO: 1195 - RNA, 23 nt, synthetic construct
  source 1..23: mol_type = other RNA
cctagaccagactcacatggtag

SEQ ID NO: 1196 - RNA, 23 nt, synthetic construct
  source 1..23: mol_type = other RNA
tcaacaagtttgcttccgtcttc

SEQ ID NO: 1197 - RNA, 23 nt, synthetic construct
  source 1..23: mol_type = other RNA
acaagtttgcttccgtcttcgga

SEQ ID NO: 1198 - RNA, 23 nt, synthetic construct
  source 1..23: mol_type = other RNA
caagtttgcttccgtcttcggaa

SEQ ID NO: 1199 - RNA, 23 nt, synthetic construct
  source 1..23: mol_type = other RNA
aagtttgcttccgtcttcggaac

SEQ ID NO: 1200 - RNA, 23 nt, synthetic construct
  source 1..23: mol_type = other RNA
agtttgcttccgtcttcggaacg

SEQ ID NO: 1201 - RNA, 23 nt, synthetic construct
  source 1..23: mol_type = other RNA
gtttgcttccgtcttcggaacga

SEQ ID NO: 1202 - RNA, 23 nt, synthetic construct
  source 1..23: mol_type = other RNA
tttgcttccgtcttcggaacgat

SEQ ID NO: 1203 - RNA, 23 nt, synthetic construct
  source 1..23: mol_type = other RNA
ttgcttccgtcttcggaacgatg

SEQ ID NO: 1204 - RNA, 23 nt, synthetic construct
  source 1..23: mol_type = other RNA
tgcttccgtcttcggaacgatgc

SEQ ID NO: 1205 - RNA, 23 nt, synthetic construct
  source 1..23: mol_type = other RNA
ctttgttttggctttttgatatg

SEQ ID NO: 1206 - RNA, 23 nt, synthetic construct
  source 1..23: mol_type = other RNA
tccggatgttggacttgactgac

SEQ ID NO: 1207 - RNA, 23 nt, synthetic construct
  source 1..23: mol_type = other RNA
tacgtagtagattcggtgcttgg

SEQ ID NO: 1208 - RNA, 23 nt, synthetic construct
  source 1..23: mol_type = other RNA
ttagacatcgaaacacgtatgca

SEQ ID NO: 1209 - RNA, 23 nt, synthetic construct
  source 1..23: mol_type = other RNA
tgtagacatcgaaacacgtatgc

SEQ ID NO: 1210 - RNA, 23 nt, synthetic construct
  source 1..23: mol_type = other RNA
tggtagacatcgaaacacgtatg

SEQ ID NO: 1211 - RNA, 23 nt, synthetic construct
  source 1..23: mol_type = other RNA
tagcggtagacatcgaaacacgt

SEQ ID NO: 1212 - RNA, 23 nt, synthetic construct
  source 1..23: mol_type = other RNA
tcagcggtagacatcgaaacacg

SEQ ID NO: 1213 - RNA, 23 nt, synthetic construct
  source 1..23: mol_type = other RNA
tagatgtacaccttgattttgtt

SEQ ID NO: 1214 - RNA, 23 nt, synthetic construct
  source 1..23: mol_type = other RNA
tgcagttcattgtactcccggga

SEQ ID NO: 1215 - RNA, 23 nt, synthetic construct
  source 1..23: mol_type = other RNA
tagcagttcattgtactcccggg

SEQ ID NO: 1216 - RNA, 23 nt, synthetic construct
  source 1..23: mol_type = other RNA
tttgaacagcaggtgatttgttc

SEQ ID NO: 1217 - RNA, 23 nt, synthetic construct
  source 1..23: mol_type = other RNA
tctgccggtaagtccaggtagaa

SEQ ID NO: 1218 - RNA, 23 nt, synthetic construct
  source 1..23: mol_type = other RNA
tacaggaatgctgacatcgtagc

SEQ ID NO: 1219 - RNA, 23 nt, synthetic construct
  source 1..23: mol_type = other RNA
tgctgaaaacaggaatgctgaca

SEQ ID NO: 1220 - RNA, 23 nt, synthetic construct
  source 1..23: mol_type = other RNA
ttggccatctgagaggacagtag

SEQ ID NO: 1221 - RNA, 23 nt, synthetic construct
  source 1..23: mol_type = other RNA
tgttcctctctgtactcagggtg

SEQ ID NO: 1222 - RNA, 23 nt, synthetic construct
  source 1..23: mol_type = other RNA
tggcttctagttcctctctgtac

SEQ ID NO: 1223 - RNA, 23 nt, synthetic construct
  source 1..23: mol_type = other RNA
ttgcatttgtccaagactaacac

SEQ ID NO: 1224 - RNA, 23 nt, synthetic construct
  source 1..23: mol_type = other RNA
tgagattggtgcatttgtccaag

SEQ ID NO: 1225 - RNA, 23 nt, synthetic construct
  source 1..23: mol_type = other RNA
tagagattggtgcatttgtccaa

SEQ ID NO: 1226 - RNA, 23 nt, synthetic construct
  source 1..23: mol_type = other RNA
tacaaaaagtagcctcctgcagc

SEQ ID NO: 1227 - RNA, 23 nt, synthetic construct
  source 1..23: mol_type = other RNA
ttacaaaaagtagcctcctgcag

SEQ ID NO: 1228 - RNA, 23 nt, synthetic construct
  source 1..23: mol_type = other RNA
tgtacaaaaagtagcctcctgca

SEQ ID NO: 1229 - RNA, 23 nt, synthetic construct
  source 1..23: mol_type = other RNA
tcgtacaaaaagtagcctcctgc

SEQ ID NO: 1230 - RNA, 23 nt, synthetic construct
  source 1..23: mol_type = other RNA
tccgtacaaaaagtagcctcctg

SEQ ID NO: 1231 - RNA, 21 nt, synthetic construct
  source 1..21: mol_type = other RNA
cagttgagaagattgtattaa

SEQ ID NO: 1232 - RNA, 21 nt, synthetic construct
  source 1..21: mol_type = other RNA
atattcaagcacatatcacga

SEQ ID NO: 1233 - RNA, 21 nt, synthetic construct
  source 1..21: mol_type = other RNA
caaaatcaaggtgtacatcta

SEQ ID NO: 1234 - RNA, 21 nt, synthetic construct
  source 1..21: mol_type = other RNA
gacaggatctatccatatgca

SEQ ID NO: 1235 - RNA, 21 nt, synthetic construct
  source 1..21: mol_type = other RNA
tctcctgtattgaaagcgtta

SEQ ID NO: 1236 - RNA, 21 nt, synthetic construct
  source 1..21: mol_type = other RNA
ggaatctagtcgctttcgtta

SEQ ID NO: 1237 - RNA, 23 nt, synthetic construct
  source 1..23: mol_type = other RNA
ttaatacaatcttctcaactgaa

SEQ ID NO: 1238 - RNA, 23 nt, synthetic construct
  source 1..23: mol_type = other RNA
tcgtgatatgtgcttgaatattc

SEQ ID NO: 1239 - RNA, 23 nt, synthetic construct
  source 1..23: mol_type = other RNA
tagatgtacaccttgattttgtt

SEQ ID NO: 1240 - RNA, 23 nt, synthetic construct
  source 1..23: mol_type = other RNA
tgcatatggatagatcctgtcat

SEQ ID NO: 1241 - RNA, 23 nt, synthetic construct
  source 1..23: mol_type = other RNA
taacgctttcaatacaggagagg

SEQ ID NO: 1242 - RNA, 23 nt, synthetic construct
  source 1..23: mol_type = other RNA
taacgaaagcgactagattccaa

SEQ ID NO: 1243 - RNA, 21 nt, synthetic construct
  source 1..21: mol_type = other RNA
  modified_base 1: mod_base = OTHER; note = 2'-O-methylcytidine-3'-phosphorothioate
  modified_base 2: mod_base = OTHER; note = 2'-O-methyladenosine-3'-phosphorothioate
  modified_base 3: mod_base = OTHER; note = 2'-O-methylguanosine-3'-phosphate
  modified_base 4: mod_base = OTHER; note = 2'-O-methyluridine-3'-phosphate
  modified_base 5: mod_base = OTHER; note = 2'-O-methyluridine-3'-phosphate
  modified_base 6: mod_base = OTHER; note = 2'-O-hexadecyl-guanosine-3'-phosphate
  modified_base 7: mod_base = OTHER; note = 2'-deoxy-2'-fluoroadenosine-3'-phosphate
  modified_base 8: mod_base = OTHER; note = 2'-O-methylguanosine-3'-phosphate
  modified_base 9: mod_base = OTHER; note = 2'-deoxy-2'-fluoroadenosine-3'-phosphate
  modified_base 10: mod_base = OTHER; note = 2'-deoxy-2'-fluoroadenosine-3'-phosphate
  modified_base 11: mod_base = OTHER; note = 2'-deoxy-2'-fluoroguanosine-3'-phosphate
  modified_base 12: mod_base = OTHER; note = 2'-O-methyladenosine-3'-phosphate
  modified_base 13: mod_base = OTHER; note = 2'-O-methyluridine-3'-phosphate
  modified_base 14: mod_base = OTHER; note = 2'-O-methyluridine-3'-phosphate
  modified_base 15: mod_base = OTHER; note = 2'-O-methylguanosine-3'-phosphate
  modified_base 16: mod_base = OTHER; note = 2'-O-methyluridine-3'-phosphate
  modified_base 17: mod_base = OTHER; note = 2'-O-methyladenosine-3'-phosphate
  modified_base 18: mod_base = OTHER; note = 2'-O-methyluridine-3'-phosphate
  modified_base 19: mod_base = OTHER; note = 2'-O-methyluridine-3'-phosphorothioate
  modified_base 20: mod_base = OTHER; note = 2'-O-methyladenosine-3'-phosphorothioate
  modified_base 21: mod_base = OTHER; note = 2'-O-methyladenosine
cagttgagaagattgtattaa

SEQ ID NO: 1244 - RNA, 21 nt, synthetic construct
  source 1..21: mol_type = other RNA
  modified_base 1: mod_base = OTHER; note = 2'-O-methyladenosine-3'-phosphorothioate
  modified_base 2: mod_base = OTHER; note = 2'-O-methyluridine-3'-phosphorothioate
  modified_base 3: mod_base = OTHER; note = 2'-O-methyladenosine-3'-phosphate
  modified_base 4: mod_base = OTHER; note = 2'-O-methyluridine-3'-phosphate
  modified_base 5: mod_base = OTHER; note = 2'-O-methyluridine-3'-phosphate
  modified_base 6: mod_base = OTHER; note = 2'-O-hexadecyl-cytidine-3'-phosphate
  modified_base 7: mod_base = OTHER; note = 2'-deoxy-2'-fluoroadenosine-3'-phosphate
  modified_base 8: mod_base = OTHER; note = 2'-O-methyladenosine-3'-phosphate
  modified_base 9: mod_base = OTHER; note = 2'-deoxy-2'-fluoroguanosine-3'-phosphate
  modified_base 10: mod_base = OTHER; note = 2'-deoxy-2'-fluorocytidine-3'-phosphate
  modified_base 11: mod_base = OTHER; note = 2'-deoxy-2'-fluoroadenosine-3'-phosphate
  modified_base 12: mod_base = OTHER; note = 2'-O-methylcytidine-3'-phosphate
  modified_base 13: mod_base = OTHER; note = 2'-O-methyladenosine-3'-phosphate
  modified_base 14: mod_base = OTHER; note = 2'-O-methyluridine-3'-phosphate
  modified_base 15: mod_base = OTHER; note = 2'-O-methyladenosine-3'-phosphate
  modified_base 16: mod_base = OTHER; note = 2'-O-methyluridine-3'-phosphate
  modified_base 17: mod_base = OTHER; note = 2'-O-methylcytidine-3'-phosphate
  modified_base 18: mod_base = OTHER; note = 2'-O-methyladenosine-3'-phosphate
  modified_base 19: mod_base = OTHER; note = 2'-O-methylcytidine-3'-phosphorothioate
  modified_base 20: mod_base = OTHER; note = 2'-O-methylguanosine-3'-phosphorothioate
  modified_base 21: mod_base = OTHER; note = 2'-O-methyladenosine
atattcaagcacatatcacga

SEQ ID NO: 1245 - RNA, 21 nt, synthetic construct
  source 1..21: mol_type = other RNA
  modified_base 1: mod_base = OTHER; note = 2'-O-methylcytidine-3'-phosphorothioate
  modified_base 2: mod_base = OTHER; note = 2'-O-methyladenosine-3'-phosphorothioate
  modified_base 3: mod_base = OTHER; note = 2'-O-methyladenosine-3'-phosphate
  modified_base 4: mod_base = OTHER; note = 2'-O-methyladenosine-3'-phosphate
  modified_base 5: mod_base = OTHER; note = 2'-O-methyladenosine-3'-phosphate
  modified_base 6: mod_base = OTHER; note = 2'-O-hexadecyl-uridine-3'-phosphate
  modified_base 7: mod_base = OTHER; note = 2'-deoxy-2'-fluorocytidine-3'-phosphate
  modified_base 8: mod_base = OTHER; note = 2'-O-methyladenosine-3'-phosphate
  modified_base 9: mod_base = OTHER; note = 2'-deoxy-2'-fluoroadenosine-3'-phosphate
  modified_base 10: mod_base = OTHER; note = 2'-deoxy-2'-fluoroguanosine-3'-phosphate
  modified_base 11: mod_base = OTHER; note = 2'-deoxy-2'-fluoroguanosine-3'-phosphate
  modified_base 12: mod_base = OTHER; note = 2'-O-methyluridine-3'-phosphate
  modified_base 13: mod_base = OTHER; note = 2'-O-methylguanosine-3'-phosphate
  modified_base 14: mod_base = OTHER; note = 2'-O-methyluridine-3'-phosphate
  modified_base 15: mod_base = OTHER; note = 2'-O-methyladenosine-3'-phosphate
  modified_base 16: mod_base = OTHER; note = 2'-O-methylcytidine-3'-phosphate
  modified_base 17: mod_base = OTHER; note = 2'-O-methyladenosine-3'-phosphate
  modified_base 18: mod_base = OTHER; note = 2'-O-methyluridine-3'-phosphate
  modified_base 19: mod_base = OTHER; note = 2'-O-methylcytidine-3'-phosphorothioate
  modified_base 20: mod_base = OTHER; note = 2'-O-methyluridine-3'-phosphorothioate
  modified_base 21: mod_base = OTHER; note = 2'-O-methyladenosine
caaaatcaaggtgtacatcta

SEQ ID NO: 1246 - RNA, 21 nt, synthetic construct
  source 1..21: mol_type = other RNA
  modified_base 1: mod_base = OTHER; note = 2'-O-methylguanosine-3'-phosphorothioate
  modified_base 2: mod_base = OTHER; note = 2'-O-methyladenosine-3'-phosphorothioate
  modified_base 3: mod_base = OTHER; note = 2'-O-methylcytidine-3'-phosphate
  modified_base 4: mod_base = OTHER; note = 2'-O-methyladenosine-3'-phosphate
  modified_base 5: mod_base = OTHER; note = 2'-O-methylguanosine-3'-phosphate
  modified_base 6: mod_base = OTHER; note = 2'-O-hexadecyl-guanosine-3'-phosphate
  modified_base 7: mod_base = OTHER; note = 2'-deoxy-2'-fluoroadenosine-3'-phosphate
  modified_base 8: mod_base = OTHER; note = 2'-O-methyluridine-3'-phosphate
  modified_base 9: mod_base = OTHER; note = 2'-deoxy-2'-fluorocytidine-3'-phosphate
  modified_base 10: mod_base = OTHER; note = 2'-deoxy-2'-fluorouridine-3'-phosphate
  modified_base 11: mod_base = OTHER; note = 2'-deoxy-2'-fluoroadenosine-3'-phosphate
  modified_base 12: mod_base = OTHER; note = 2'-O-methyluridine-3'-phosphate
  modified_base 13: mod_base = OTHER; note = 2'-O-methylcytidine-3'-phosphate
  modified_base 14: mod_base = OTHER; note = 2'-O-methylcytidine-3'-phosphate
  modified_base 15: mod_base = OTHER; note = 2'-O-methyladenosine-3'-phosphate
  modified_base 16: mod_base = OTHER; note = 2'-O-methyluridine-3'-phosphate
  modified_base 17: mod_base = OTHER; note = 2'-O-methyladenosine-3'-phosphate
  modified_base 18: mod_base = OTHER; note = 2'-O-methyluridine-3'-phosphate
  modified_base 19: mod_base = OTHER; note = 2'-O-methylguanosine-3'-phosphorothioate
  modified_base 20: mod_base = OTHER; note = 2'-O-methylcytidine-3'-phosphorothioate
  modified_base 21: mod_base = OTHER; note = 2'-O-methyladenosine
gacaggatctatccatatgca

SEQ ID NO: 1247 - RNA, 21 nt, synthetic construct
  source 1..21: mol_type = other RNA
  modified_base 1: mod_base = OTHER; note = 2'-O-methyluridine-3'-phosphorothioate
  modified_base 2: mod_base = OTHER; note = 2'-O-methylcytidine-3'-phosphorothioate
  modified_base 3: mod_base = OTHER; note = 2'-O-methyluridine-3'-phosphate
  modified_base 4: mod_base = OTHER; note = 2'-O-methylcytidine-3'-phosphate
  modified_base 5: mod_base = OTHER; note = 2'-O-methylcytidine-3'-phosphate
  modified_base 6: mod_base = OTHER; note = 2'-O-hexadecyl-uridine-3'-phosphate
  modified_base 7: mod_base = OTHER; note = 2'-deoxy-2'-fluoroguanosine-3'-phosphate
  modified_base 8: mod_base = OTHER; note = 2'-O-methyluridine-3'-phosphate
  modified_base 9: mod_base = OTHER; note = 2'-deoxy-2'-fluoroadenosine-3'-phosphate
  modified_base 10: mod_base = OTHER; note = 2'-deoxy-2'-fluorouridine-3'-phosphate
  modified_base 11: mod_base = OTHER; note = 2'-deoxy-2'-fluorouridine-3'-phosphate
  modified_base 12: mod_base = OTHER; note = 2'-O-methylguanosine-3'-phosphate
  modified_base 13: mod_base = OTHER; note = 2'-O-methyladenosine-3'-phosphate
  modified_base 14: mod_base = OTHER; note = 2'-O-methyladenosine-3'-phosphate
  modified_base 15: mod_base = OTHER; note = 2'-O-methyladenosine-3'-phosphate
  modified_base 16: mod_base = OTHER; note = 2'-O-methylguanosine-3'-phosphate
  modified_base 17: mod_base = OTHER; note = 2'-O-methylcytidine-3'-phosphate
  modified_base 18: mod_base = OTHER; note = 2'-O-methylguanosine-3'-phosphate
  modified_base 19: mod_base = OTHER; note = 2'-O-methyluridine-3'-phosphorothioate
  modified_base 20: mod_base = OTHER; note = 2'-O-methyluridine-3'-phosphorothioate
  modified_base 21: mod_base = OTHER; note = 2'-O-methyladenosine
tctcctgtattgaaagcgtta

SEQ ID NO: 1248 - RNA, 21 nt, synthetic construct
  source 1..21: mol_type = other RNA
  modified_base 1: mod_base = OTHER; note = 2'-O-methylguanosine-3'-phosphorothioate
  modified_base 2: mod_base = OTHER; note = 2'-O-methylguanosine-3'-phosphorothioate
  modified_base 3: mod_base = OTHER; note = 2'-O-methyladenosine-3'-phosphate
  modified_base 4: mod_base = OTHER; note = 2'-O-methyladenosine-3'-phosphate
  modified_base 5: mod_base = OTHER; note = 2'-O-methyluridine-3'-phosphate
  modified_base 6: mod_base = OTHER; note = 2'-O-hexadecyl-cytidine-3'-phosphate
  modified_base 7: mod_base = OTHER; note = 2'-deoxy-2'-fluorouridine-3'-phosphate
  modified_base 8: mod_base = OTHER; note = 2'-O-methyladenosine-3'-phosphate
  modified_base 9: mod_base = OTHER; note = 2'-deoxy-2'-fluoroguanosine-3'-phosphate
  modified_base 10: mod_base = OTHER; note = 2'-deoxy-2'-fluorouridine-3'-phosphate
  modified_base 11: mod_base = OTHER; note = 2'-deoxy-2'-fluorocytidine-3'-phosphate
  modified_base 12: mod_base = OTHER; note = 2'-O-methylguanosine-3'-phosphate
  modified_base 13: mod_base = OTHER; note = 2'-O-methylcytidine-3'-phosphate
  modified_base 14: mod_base = OTHER; note = 2'-O-methyluridine-3'-phosphate
  modified_base 15: mod_base = OTHER; note = 2'-O-methyluridine-3'-phosphate
  modified_base 16: mod_base = OTHER; note = 2'-O-methyluridine-3'-phosphate
  modified_base 17: mod_base = OTHER; note = 2'-O-methylcytidine-3'-phosphate
  modified_base 18: mod_base = OTHER; note = 2'-O-methylguanosine-3'-phosphate
  modified_base 19: mod_base = OTHER; note = 2'-O-methyluridine-3'-phosphorothioate
  modified_base 20: mod_base = OTHER; note = 2'-O-methyluridine-3'-phosphorothioate
  modified_base 21: mod_base = OTHER; note = 2'-O-methyladenosine
ggaatctagtcgctttcgtta

SEQ ID NO: 1249 - RNA, 23 nt, synthetic construct
  source 1..23: mol_type = other RNA
  modified_base 1: mod_base = OTHER; note = 2'-O-methyluridine-3'-phosphorothioate 5'-(E)-Vinylphosphonate
  modified_base 2: mod_base = OTHER; note = 2'-deoxy-2'-fluorouridine-3'-phosphorothioate
  modified_base 3: mod_base = OTHER; note = 2'-O-methyladenosine-3'-phosphate
  modified_base 4: mod_base = OTHER; note = 2'-O-methyladenosine-3'-phosphate
  modified_base 5: mod_base = OTHER; note = 2'-O-methyluridine-3'-phosphate
  modified_base 6: mod_base = OTHER; note = 2'-deoxy-2'-fluoroadenosine-3'-phosphate
  modified_base 7: mod_base = OTHER; note = 2'-O-methylcytidine-3'-phosphate
  modified_base 8: mod_base = OTHER; note = 2'-deoxy-2'-fluoroadenosine-3'-phosphate
  modified_base 9: mod_base = OTHER; note = 2'-deoxy-2'-fluoroadenosine-3'-phosphate
  modified_base 10: mod_base = OTHER; note = 2'-O-methyluridine-3'-phosphate
  modified_base 11: mod_base = OTHER; note = 2'-O-methylcytidine-3'-phosphate
  modified_base 12: mod_base = OTHER; note = 2'-O-methyluridine-3'-phosphate
  modified_base 13: mod_base = OTHER; note = 2'-O-methyluridine-3'-phosphate
  modified_base 14: mod_base = OTHER; note = 2'-deoxy-2'-fluorocytidine-3'-phosphate
  modified_base 15: mod_base = OTHER; note = 2'-O-methyluridine-3'-phosphate
  modified_base 16: mod_base = OTHER; note = 2'-deoxy-2'-fluorocytidine-3'-phosphate
  modified_base 17: mod_base = OTHER; note = 2'-O-methyladenosine-3'-phosphate
  modified_base 18: mod_base = OTHER; note = 2'-O-methyladenosine-3'-phosphate
  modified_base 19: mod_base = OTHER; note = 2'-O-methylcytidine-3'-phosphate
  modified_base 20: mod_base = OTHER; note = 2'-O-methyluridine-3'-phosphate
  modified_base 21: mod_base = OTHER; note = 2'-O-methylguanosine-3'-phosphorothioate
  modified_base 22: mod_base = OTHER; note = 2'-O-methyladenosine-3'-phosphorothioate
  modified_base 23: mod_base = OTHER; note = 2'-O-methyladenosine
ttaatacaatcttctcaactgaa

SEQ ID NO: 1250 - RNA, 23 nt, synthetic construct
  source 1..23: mol_type = other RNA
  modified_base 1: mod_base = OTHER; note = 2'-O-methyluridine-3'-phosphorothioate 5'-(E)-Vinylphosphonate
  modified_base 2: mod_base = OTHER; note = 2'-deoxy-2'-fluorocytidine-3'-phosphorothioate
  modified_base 3: mod_base = OTHER; note = 2'-O-methylguanosine-3'-phosphate
  modified_base 4: mod_base = OTHER; note = 2'-O-methyluridine-3'-phosphate
  modified_base 5: mod_base = OTHER; note = 2'-O-methylguanosine-3'-phosphate
  modified_base 6: mod_base = OTHER; note = 2'-deoxy-2'-fluoroadenosine-3'-phosphate
  modified_base 7: mod_base = OTHER; note = 2'-O-methyluridine-3'-phosphate
  modified_base 8: mod_base = OTHER; note = 2'-deoxy-2'-fluoroadenosine-3'-phosphate
  modified_base 9: mod_base = OTHER; note = 2'-deoxy-2'-fluorouridine-3'-phosphate
  modified_base 10: mod_base = OTHER; note = 2'-O-methylguanosine-3'-phosphate
  modified_base 11: mod_base = OTHER; note = 2'-O-methyluridine-3'-phosphate
  modified_base 12: mod_base = OTHER; note = 2'-O-methylguanosine-3'-phosphate
  modified_base 13: mod_base = OTHER; note = 2'-O-methylcytidine-3'-phosphate
  modified_base 14: mod_base = OTHER; note = 2'-deoxy-2'-fluorouridine-3'-phosphate
  modified_base 15: mod_base = OTHER; note = 2'-O-methyluridine-3'-phosphate
  modified_base 16: mod_base = OTHER; note = 2'-deoxy-2'-fluoroguanosine-3'-phosphate
  modified_base 17: mod_base = OTHER; note = 2'-O-methyladenosine-3'-phosphate
  modified_base 18: mod_base = OTHER; note = 2'-O-methyladenosine-3'-phosphate
  modified_base 19: mod_base = OTHER; note = 2'-O-methyluridine-3'-phosphate
  modified_base 20: mod_base = OTHER; note = 2'-O-methyladenosine-3'-phosphate
  modified_base 21: mod_base = OTHER; note = 2'-O-methyluridine-3'-phosphorothioate
  modified_base 22: mod_base = OTHER; note = 2'-O-methyluridine-3'-phosphorothioate
  modified_base 23: mod_base = OTHER; note = 2'-O-methylcytidine
tcgtgatatgtgcttgaatattc

SEQ ID NO: 1251 - RNA, 23 nt, synthetic construct
  source 1..23: mol_type = other RNA
  modified_base 1: mod_base = OTHER; note = 2'-O-methyluridine-3'-phosphorothioate 5'-(E)-Vinylphosphonate
  modified_base 2: mod_base = OTHER; note = 2'-deoxy-2'-fluoroadenosine-3'-phosphorothioate
  modified_base 3: mod_base = OTHER; note = 2'-O-methylguanosine-3'-phosphate
  modified_base 4: mod_base = OTHER; note = 2'-O-methyladenosine-3'-phosphate
  modified_base 5: mod_base = OTHER; note = 2'-O-methyluridine-3'-phosphate
  modified_base 6: mod_base = OTHER; note = 2'-deoxy-2'-fluoroguanosine-3'-phosphate
  modified_base 7: mod_base = OTHER; note = 2'-O-methyluridine-3'-phosphate
  modified_base 8: mod_base = OTHER; note = 2'-deoxy-2'-fluoroadenosine-3'-phosphate
  modified_base 9: mod_base = OTHER; note = 2'-deoxy-2'-fluorocytidine-3'-phosphate
  modified_base 10: mod_base = OTHER; note = 2'-O-methyladenosine-3'-phosphate
  modified_base 11: mod_base = OTHER; note = 2'-O-methylcytidine-3'-phosphate
  modified_base 12: mod_base = OTHER; note = 2'-O-methylcytidine-3'-phosphate
  modified_base 13: mod_base = OTHER; note = 2'-O-methyluridine-3'-phosphate
  modified_base 14: mod_base = OTHER; note = 2'-deoxy-2'-fluorouridine-3'-phosphate
  modified_base 15: mod_base = OTHER; note = 2'-O-methylguanosine-3'-phosphate
  modified_base 16: mod_base = OTHER; note = 2'-deoxy-2'-fluoroadenosine-3'-phosphate
  modified_base 17: mod_base = OTHER; note = 2'-O-methyluridine-3'-phosphate
  modified_base 18: mod_base = OTHER; note = 2'-O-methyluridine-3'-phosphate
  modified_base 19: mod_base = OTHER; note = 2'-O-methyluridine-3'-phosphate
  modified_base 20: mod_base = OTHER; note = 2'-O-methyluridine-3'-phosphate
  modified_base 21: mod_base = OTHER; note = 2'-O-methylguanosine-3'-phosphorothioate
  modified_base 22: mod_base = OTHER; note = 2'-O-methyluridine-3'-phosphorothioate
  modified_base 23: mod_base = OTHER; note = 2'-O-methyluridine
tagatgtacaccttgattttgtt

SEQ ID NO: 1252 - RNA, 23 nt, synthetic construct
  source 1..23: mol_type = other RNA
  modified_base 1: mod_base = OTHER; note = 2'-O-methyluridine-3'-phosphorothioate 5'-(E)-Vinylphosphonate
  modified_base 2: mod_base = OTHER; note = 2'-deoxy-2'-fluoroguanosine-3'-phosphorothioate
  modified_base 3: mod_base = OTHER; note = 2'-O-methylcytidine-3'-phosphate
  modified_base 4: mod_base = OTHER; note = 2'-O-methyladenosine-3'-phosphate
  modified_base 5: mod_base = OTHER; note = 2'-O-methyluridine-3'-phosphate
  modified_base 6: mod_base = OTHER; note = 2'-deoxy-2'-fluoroadenosine-3'-phosphate
  modified_base 7: mod_base = OTHER; note = 2'-O-methyluridine-3'-phosphate
  modified_base 8: mod_base = OTHER; note = 2'-deoxy-2'-fluoroguanosine-3'-phosphate
  modified_base 9: mod_base = OTHER; note = 2'-deoxy-2'-fluoroguanosine-3'-phosphate
  modified_base 10: mod_base = OTHER; note = 2'-O-methyladenosine-3'-phosphate
  modified_base 11: mod_base = OTHER; note = 2'-O-methyluridine-3'-phosphate
  modified_base 12: mod_base = OTHER; note = 2'-O-methyladenosine-3'-phosphate
  modified_base 13: mod_base = OTHER; note = 2'-O-methylguanosine-3'-phosphate
  modified_base 14: mod_base = OTHER; note = 2'-deoxy-2'-fluoroadenosine-3'-phosphate
  modified_base 15: mod_base = OTHER; note = 2'-O-methyluridine-3'-phosphate
  modified_base 16: mod_base = OTHER; note = 2'-deoxy-2'-fluorocytidine-3'-phosphate
  modified_base 17: mod_base = OTHER; note = 2'-O-methylcytidine-3'-phosphate
  modified_base 18: mod_base = OTHER; note = 2'-O-methyluridine-3'-phosphate
  modified_base 19: mod_base = OTHER; note = 2'-O-methylguanosine-3'-phosphate
  modified_base 20: mod_base = OTHER; note = 2'-O-methyluridine-3'-phosphate
  modified_base 21: mod_base = OTHER; note = 2'-O-methylcytidine-3'-phosphorothioate
  modified_base 22: mod_base = OTHER; note = 2'-O-methyladenosine-3'-phosphorothioate
  modified_base 23: mod_base = OTHER; note = 2'-O-methyluridine
tgcatatggatagatcctgtcat

SEQ ID NO: 1253 - RNA, 23 nt, synthetic construct
  source 1..23: mol_type = other RNA
  modified_base 1: mod_base = OTHER; note = 2'-O-methyluridine-3'-phosphorothioate 5'-(E)-Vinylphosphonate
  modified_base 2: mod_base = OTHER; note = 2'-deoxy-2'-fluoroadenosine-3'-phosphorothioate
  modified_base 3: mod_base = OTHER; note = 2'-O-methyladenosine-3'-phosphate
  modified_base 4: mod_base = OTHER; note = 2'-O-methylcytidine-3'-phosphate
  modified_base 5: mod_base = OTHER; note = 2'-O-methylguanosine-3'-phosphate
  modified_base 6: mod_base = OTHER; note = 2'-deoxy-2'-fluorocytidine-3'-phosphate
  modified_base 7: mod_base = OTHER; note = 2'-O-methyluridine-3'-phosphate
  modified_base 8: mod_base = OTHER; note = 2'-deoxy-2'-fluorouridine-3'-phosphate
  modified_base 9: mod_base = OTHER; note = 2'-deoxy-2'-fluorouridine-3'-phosphate
  modified_base 10: mod_base = OTHER; note = 2'-O-methylcytidine-3'-phosphate
  modified_base 11: mod_base = OTHER; note = 2'-O-methyladenosine-3'-phosphate
  modified_base 12: mod_base = OTHER; note = 2'-O-methyladenosine-3'-phosphate
  modified_base 13: mod_base = OTHER; note = 2'-O-methyluridine-3'-phosphate
  modified_base 14: mod_base = OTHER; note = 2'-deoxy-2'-fluoroadenosine-3'-phosphate
  modified_base 15: mod_base = OTHER; note = 2'-O-methylcytidine-3'-phosphate
  modified_base 16: mod_base = OTHER; note = 2'-deoxy-2'-fluoroadenosine-3'-phosphate
  modified_base 17: mod_base = OTHER; note = 2'-O-methylguanosine-3'-phosphate
  modified_base 18: mod_base = OTHER; note = 2'-O-methylguanosine-3'-phosphate
  modified_base 19: mod_base = OTHER; note = 2'-O-methyladenosine-3'-phosphate
  modified_base 20: mod_base = OTHER; note = 2'-O-methylguanosine-3'-phosphate
  modified_base 21: mod_base = OTHER; note = 2'-O-methyladenosine-3'-phosphorothioate
  modified_base 22: mod_base = OTHER; note = 2'-O-methylguanosine-3'-phosphorothioate
  modified_base 23: mod_base = OTHER; note = 2'-O-methylguanosine
taacgctttcaatacaggagagg

SEQ ID NO: 1254 - RNA, 23 nt, synthetic construct
  source 1..23: mol_type = other RNA
  modified_base 1: mod_base = OTHER; note = 2'-O-methyluridine-3'-phosphorothioate 5'-(E)-Vinylphosphonate
  modified_base 2: mod_base = OTHER; note = 2'-deoxy-2'-fluoroadenosine-3'-phosphorothioate
  modified_base 3: mod_base = OTHER; note = 2'-O-methyladenosine-3'-phosphate
  modified_base 4: mod_base = OTHER; note = 2'-O-methylcytidine-3'-phosphate
  modified_base 5: mod_base = OTHER; note = 2'-O-methylguanosine-3'-phosphate
  modified_base 6: mod_base = OTHER; note = 2'-deoxy-2'-fluoroadenosine-3'-phosphate
  modified_base 7: mod_base = OTHER; note = 2'-O-methyladenosine-3'-phosphate
  modified_base 8: mod_base = OTHER; note = 2'-deoxy-2'-fluoroadenosine-3'-phosphate
  modified_base 9: mod_base = OTHER; note = 2'-deoxy-2'-fluoroguanosine-3'-phosphate
  modified_base 10: mod_base = OTHER; note = 2'-O-methylcytidine-3'-phosphate
  modified_base 11: mod_base = OTHER; note = 2'-O-methylguanosine-3'-phosphate
  modified_base 12: mod_base = OTHER; note = 2'-O-methyladenosine-3'-phosphate
  modified_base 13: mod_base = OTHER; note = 2'-O-methylcytidine-3'-phosphate
  modified_base 14: mod_base = OTHER; note = 2'-deoxy-2'-fluorouridine-3'-phosphate
  modified_base 15: mod_base = OTHER; note = 2'-O-methyladenosine-3'-phosphate
  modified_base 16: mod_base = OTHER; note = 2'-deoxy-2'-fluoroguanosine-3'-phosphate
  modified_base 17: mod_base = OTHER; note = 2'-O-methyladenosine-3'-phosphate
  modified_base 18: mod_base = OTHER; note = 2'-O-methyluridine-3'-phosphate
  modified_base 19: mod_base = OTHER; note = 2'-O-methyluridine-3'-phosphate
  modified_base 20: mod_base = OTHER; note = 2'-O-methylcytidine-3'-phosphate
  modified_base 21: mod_base = OTHER; note = 2'-O-methylcytidine-3'-phosphorothioate
  modified_base 22: mod_base = OTHER; note = 2'-O-methyladenosine-3'-phosphorothioate
  modified_base 23: mod_base = OTHER; note = 2'-O-methyladenosine
taacgaaagcgactagattccaa

SEQ ID NO: 1255 - RNA, 23 nt, synthetic construct
  source 1..23: mol_type = other RNA
ttcagttgagaagattgtattaa

SEQ ID NO: 1256 - RNA, 23 nt, synthetic construct
  source 1..23: mol_type = other RNA
gaatattcaagcacatatcacgt

SEQ ID NO: 1257 - RNA, 23 nt, synthetic construct
  source 1..23: mol_type = other RNA
aacaaaatcaaggtgtacatcta

SEQ ID NO: 1258 - RNA, 23 nt, synthetic construct
  source 1..23: mol_type = other RNA
atgacaggatctatccatatgca

SEQ ID NO: 1259 - RNA, 23 nt, synthetic construct
  source 1..23: mol_type = other RNA
cctctcctgtattgaaagcgttt

SEQ ID NO: 1260 - RNA, 23 nt, synthetic construct
  source 1..23: mol_type = other RNA
ttggaatctagtcgctttcgtta

SEQ ID NO: 1261 - protein, 16 aa, synthetic construct
  REGION 1..16: note = Synthetic peptide
AAVALLPAVLLALLAP

SEQ ID NO: 1262 - protein, 11 aa, synthetic construct
  REGION 1..11: note = Synthetic peptide
AALLPVLLAAP

SEQ ID NO: 1263 - protein, 13 aa, Human immunodeficiency virus
  REGION 1..13: note = misc_feature - HIV Tat protein
GRKKRRQRRRPPQ

SEQ ID NO: 1264 - protein, 16 aa, Drosophila sp.
RQIKIWFQNRRMKWKK

1. A modulator of inhibin subunit beta E (INHBE).

2. The modulator of claim 1, wherein the modulator is selected from the group consisting of an oligonucleotide that targets INHBE; an antibody, or antigen-binding fragment thereof, that specifically binds INHBE; a small molecule; a guideRNA that effects ADAR editing; and a guideRNA that effects CRISPR editing.

3. The modulator of claim 2, wherein the oligonucleotide that targets INHBE is a double stranded ribonucleic acid (dsRNA) or an antisense polynucleotide agent.

4.-10. (canceled)

11. The modulator of claim 3, wherein the antisense polynucleotide agent comprises 4 to 50 contiguous nucleotides, wherein at least one of the contiguous nucleotides is a modified nucleotide, and wherein the nucleotide sequence of the agent is 80% complementary over its entire length to the equivalent region of the nucleotide sequence of any one of SEQ ID NOs:1, 2, 4, 6, 8, or 10.

12. The modulator of claim 11, wherein the equivalent region is any one of the target regions of SEQ ID NO:1 provided in Table 4.

13. The modulator of claim 3, wherein the antisense polynucleotide agent comprises at least 8 contiguous nucleotides differing by no more than 3 nucleotides from any one of the nucleotide sequences listed in Table 3.

14. (canceled)

15. The modulator of claim 3, wherein all of the nucleotides of the antisense polynucleotide agent comprise a nucleotide modification.

16. The modulator of claim 3, wherein the antisense polynucleotide agent is 10 to 40 nucleotides in length: 10-30 nucleotides in length, 18-30 nucleotides in length; or 18-24 nucleotides in length.

17.-23. (canceled)

24. The modulator of claim 3, wherein the modified nucleotide comprises a modified sugar moiety selected from the group consisting of a 2′-O-methoxyethyl modified sugar moiety, a 2′-methoxy modified sugar moiety, a 2′-O-alkyl modified sugar moiety, and a bicyclic sugar moiety.

25. (canceled)

26. The modulator of claim 3, wherein the modified nucleotide is a 5-methylcytosine.

27. The modulator of claim 3, wherein the modified nucleotide comprises a modified internucleoside linkage.

28.-43. (canceled)

44. The modulator of claim 3, wherein the antisense polynucleotide agent comprises
a gap segment consisting of linked deoxynucleotides;
a 5′-wing segment consisting of linked nucleotides;
a 3′-wing segment consisting of linked nucleotides;
wherein the gap segment is positioned between the 5′-wing segment and the 3′-wing segment and wherein each nucleotide of each wing segment comprises a modified sugar.

45. The modulator of claim 44, wherein the gap segment is ten 2′-deoxynucleotides in length and each of the wing segments is five nucleotides in length.

46.-50. (canceled)

51. The modulator of claim 3, wherein the modulator further comprises a ligand.

52.-54. (canceled)

55. A pharmaceutical composition for inhibiting expression and/or activity of INHBE comprising the modulator of claim 1.

56.-63. (canceled)

64. A method of inhibiting the expression and/or activity of INHBE in a cell, the method comprising:
(a) contacting the cell with a modulator of claim 1; and
(b) maintaining the cell produced in step (a) for a time sufficient to obtain inhibition of INHBE expression and/or activity, thereby inhibiting expression and/or activity of INHBE in the cell.

65.-72. (canceled)

73. A method of treating a subject having a disorder that would benefit from reduction in inhibin subunit beta E (INHBE) expression and/or activity, comprising administering to the subject a therapeutically effective amount of the modulator of claim 1, thereby treating the subject having the disorder that would benefit from reduction in INHBE expression.

74. (canceled)

75. The method of claim 73, wherein the disorder is an INHBE-associated disorder.

76. The method of claim 75, wherein the INHBE-associated disorder is selected from the group consisting of a metabolic disorder, a cardiovascular disorder, and hypertension.

77.-85. (canceled)

86. A kit, a vial, or a syringe comprising the modulator of claim 1.

87. (canceled)

88. (canceled)
